(19) United States
(12) Patent Application Publication
(10) Pub. No.: US 2002/0055627 A1
(43) Pub. Date: May 9, 2002

(54) Nucleic acids, proteins and antibodies

(76) Inventors: Craig A. Rosen, Laytonsville, MD (US); Steven M. Ruben, Olney, MD (US)

Correspondence Address: HUMAN GENOME SCIENCES INC, 9410 KEY WEST AVENUE, ROCKVILLE, MD, 20850

(21) Appl. No.: 09/925,299

(22) Filed: Aug. 10, 2001

Related U.S. Application Data
(63) Continuation of application No. PCT/US00/05883, filed on Mar. 8, 2000.
(60) Provisional application No. 60/124,270, filed on Mar. 12, 1999.

(51) Int. Cl. A01N 37/18; A61K 38/00; G01N 33/53; G01N 33/567; C07H 21/04; C12N 15/00; C12N 15/09; C12N 15/63; C12N 15/70; C12N 15/74; C07K 5/00; C07K 7/00; C07K 16/00; C07K 17/00; C12N 5/00; C12N 5/02; C12P 21/08

(52) U.S. Cl. 536/23.5; 435/320.1; 435/325; 530/324; 530/387.9; 514/2; 435/7.2

(57) ABSTRACT

The present invention relates to novel colorectal cancer related polynucleotides, the polypeptides encoded by these polynucleotides herein collectively referred to as “colorectal cancer antigens,” and antibodies that immunospecifically bind these polypeptides, and the use of such colorectal cancer polynucleotides, antigens, and antibodies for detecting, treating, preventing and/or prognosing disorders of the colon and/or rectum, including, but not limited to, the presence of colorectal cancer and colorectal cancer metastases. More specifically, isolated colorectal cancer nucleic acid molecules are provided encoding novel colorectal cancer polypeptides. Novel colorectal cancer polypeptides and antibodies that bind to these polypeptides are provided. Also provided are vectors, host cells, and recombinant and synthetic methods for producing human colorectal cancer polynucleotides, polypeptides, and/or antibodies. The invention further relates to diagnostic and therapeutic methods useful for diagnosing, treating, preventing and/or prognosing disorders related to the colon and/or rectum, including colorectal cancer, and therapeutic methods for treating such disorders. The invention further relates to screening methods for identifying agonists and antagonists of polynucleotides and polypeptides of the invention. The invention further relates to methods and/or compositions for inhibiting or promoting the production and/or function of the polypeptides of the invention.

### FIELD OF THE INVENTION

[0001] The present invention relates to novel colorectal cancer related polynucleotides, the polypeptides encoded by these polynucleotides herein collectively referred to as “colorectal cancer antigens,” and antibodies that immunospecifically bind these polypeptides, and the use of such colorectal cancer polynucleotides, antigens, and antibodies for detecting, treating, preventing and/or prognosing disorders of the colon and/or rectum, including, but not limited to, the presence of colorectal cancer and colorectal cancer metastases. More specifically, isolated colorectal cancer nucleic acid molecules are provided encoding novel colorectal cancer polypeptides. Novel colorectal cancer polypeptides and antibodies that bind to these polypeptides are provided. Also provided are vectors, host cells, and recombinant and synthetic methods for producing human colorectal cancer polynucleotides, polypeptides, and/or antibodies. The invention further relates to diagnostic and therapeutic methods useful for diagnosing, treating, preventing and/or prognosing disorders related to the colon and/or rectum, including colorectal cancer, and therapeutic methods for treating such disorders. The invention further relates to screening methods for identifying agonists and antagonists of polynucleotides and polypeptides of the invention. The invention further relates to methods and/or compositions for inhibiting or promoting the production and/or function of the polypeptides of the invention.

### BACKGROUND OF THE INVENTION

[0002] Colorectal cancers are among the most common cancers in men and women in the U.S. and are one of the leading causes of death. Other than surgical resection no other systemic or adjuvant therapy is available. Vogelstein and colleagues have described the sequence of genetic events that appear to be associated with the multistep process of colon cancer development in humans (Trends Genet 9(4):138-41 (1993)). An understanding of the molecular genetics of carcinogenesis, however, has not led to preventative or therapeutic measures. It can be expected that advances in molecular genetics will lead to better risk assessment and early diagnosis but colorectal cancers will remain a deadly disease for a majority of patients due to the lack of an adjuvant therapy. Adjuvant or systemic treatments are likely to arise from a better understanding of the autocrine factors responsible for the continued proliferation of cancer cells.

[0003] Colorectal carcinoma is a malignant neoplastic disease. There is a high incidence of colorectal carcinoma in the Western world, particularly in the United States. Tumors of this type often metastasize through lymphatic and vascular channels. Many patients with colorectal carcinoma eventually die from this disease. In fact, it is estimated that 62,000 persons in the United States alone die of colorectal carcinoma annually.

[0004] At the present time the only systemic treatment available for colon cancer is chemotherapy. However, chemotherapy has not proven to be very effective for the treatment of colon cancers for several reasons, the most important of which is the fact that colon cancers express high levels of the MDR gene (that codes for multi-drug resistance gene products). The MDR gene products actively transport the toxic substances out of the cell before the chemotherapeutic agents can damage the DNA machinery of the cell. These toxic substances harm the normal cell populations more than they harm the colon cancer cells for the above reasons.

[0005] There is no effective systemic treatment for treating colon cancers other than surgically removing the cancers. In the case of several other cancers, including breast cancers, the knowledge of growth promoting factors (such as EGF, estradiol, IGF-1 1) that appear to be expressed or effect the growth of the cancer cells, has been translated for treatment purposes. But in the case of colon cancers this knowledge has not been applied and therefore the treatment outcome for colon cancers remains bleak.

[0006] There is a need, therefore, for identification and characterization of such factors that modulate activation and differentiation of colon and/or rectal cells, both normally and in disease states. In particular, there is a need to isolate and characterize additional molecules that mediate apoptosis, DNA repair, tumor-mediated angiogenesis, genetic imprinting, immune responses to tumors and tumor antigens and, among other things, that can play a role in detecting, preventing, ameliorating or correcting dysfunctions or diseases of the colon and/or rectum.

[0007] The discovery of new human colorectal cancer associated polynucleotides, the polypeptides encoded by them, and antibodies that immunospecifically bind these polypeptides, satisfies a need in the art by providing new compositions which are useful in the diagnosis, treatment, prevention and/or prognosis of disorders of the colon and/or rectum including, but not limited to, neoplastic disorders, such as, polyps (e.g., sessile polyp, adenomatous polyp, inflammatory polyps) adenomas (e.g., tubular adenoma, tubovillous adenomas, villous adenoma, Gardner syndrome, Peutz-Jeghers syndrome) hyperplastic, polyposis, villous, pseudopolyps, leiomyomas, carcinoids, lipomas, and angiomas cancers (e.g., rectal cancer, adenocarcinoma, colorectal carcinoma, colon cancer, colon carcinoma, colorectal cancer); colonic diseases and/or as described under “Gastrointestinal Disorders” below.

### SUMMARY OF THE INVENTION

[0008] The present invention includes isolated nucleic acid molecules comprising, or alternatively, consisting of, a colorectal and/or colorectal cancer associated polynucleotide sequence disclosed in the sequence listing (as SEQ ID Nos: 1 to 773) and/or contained in a human cDNA clone described in Tables 1, 2 and 5 and deposited with the American Type Culture Collection (“ATCC”). Fragments, variant, and derivatives of these nucleic acid molecules are also encompassed by the invention. The present invention also includes isolated nucleic acid molecules comprising, or alternatively consisting of, a polynucleotide encoding a colorectal and/or colorectal cancer polypeptide. The present invention further includes colorectal and/or colorectal cancer polypeptides encoded by these polynucleotides. Further provided for are amino acid sequences comprising, or alternatively consisting of, colorectal and/or colorectal cancer polypeptides as disclosed in the sequence listing (as SEQ ID Nos: 774 to 1546) and/or encoded by a human cDNA clone described in Tables 1, 2 and 5 and deposited with the ATCC. Antibodies that bind these polypeptides are also encompassed by the invention. Polypeptide fragments, variants, and derivatives of these amino acid sequences are also encompassed by the invention, as are polynucleotides encoding these polypeptides and antibodies that bind these polypeptides. Also provided are diagnostic methods for diagnosing and treating, preventing, and/or prognosing disorders related to the colon and/or rectum, including colorectal cancer, and therapeutic methods for treating such disorders. The invention further relates to screening methods for identifying agonists and antagonists of colorectal cancer antigens of the invention.

### DETAILED DESCRIPTION

[0009] Tables

[0010] Table 1 summarizes some of the colorectal cancer antigens encompassed by the invention (including contig sequences (SEQ ID NO:X) and the cDNA clone related to the contig sequence) and further summarizes certain characteristics of the colorectal cancer polynucleotides and the polypeptides encoded thereby. The first column shows the “SEQ ID NO:” for each of the 773 colorectal cancer antigen polynucleotide sequences of the invention. The second column provides a unique “Sequence/Contig ID” identification for each colorectal and/or colorectal cancer associated sequence. The third column, “Gene Name,” and the fourth column, “Overlap,” provide a putative identification of the gene based on the sequence similarity of its translation product to an amino acid sequence found in a publicly accessible gene database and the database accession no. for the database sequence having similarity, respectively. The fifth and sixth columns provide the location (nucleotide position nos. within the contig), “Start” and “End”, in the polynucleotide sequence “SEQ ID NO:X” that delineate the preferred ORF shown in the sequence listing as SEQ ID NO:Y. The seventh and eighth columns provide the “% Identity” (percent identity) and “% Similarity” (percent similarity), respectively, observed between the aligned sequence segments of the translation product of SEQ ID NO:X and the database sequence. The ninth column provides a unique “Clone ID” for a cDNA clone related to each contig sequence.

[0011] Table 2 summarizes ATCC Deposits, Deposit dates, and ATCC designation numbers of deposits made with the ATCC in connection with the present application.

[0012] Table 3 indicates public ESTs, of which at least one, two, three, four, five, ten, fifteen or more of any one or more of these public EST sequences are optionally excluded from certain embodiments of the invention.

[0013] Table 4 lists residues comprising antigenic epitopes of antigenic epitope-bearing fragments present in most of the colorectal and/or colorectal cancer associated polynucleotides described in Table 1 as predicted by the inventors using the algorithm of Jameson and Wolf, (1988) Comp. Appl. Biosci. 4:181-186. The Jameson-Wolf antigenic analysis was performed using the computer program PROTEAN (Version 3.11 for the Power MacIntosh, DNASTAR, Inc., 1228 South Park Street Madison, Wis.). Colorectal and/or colorectal cancer associated polypeptides shown in Table 1 may possess one or more antigenic epitopes comprising residues described in Table 4. It will be appreciated that depending on the analytical criteria used to predict antigenic determinants, the exact address of the determinant may vary slightly. The residues and locations shown in Table 4 correspond to the amino acid sequences for most colorectal and/or colorectal cancer associated polypeptide sequence shown in the Sequence Listing.

[0014] Table 5 shows the cDNA libraries sequenced, and ATCC designation numbers and vector information relating to these cDNA libraries.

[0015] Definitions

[0016] The following definitions are provided to facilitate understanding of certain terms used throughout this specification.

[0017] In the present invention, “isolated” refers to material removed from its original environment (e.g., the natural environment if it is naturally occurring), and thus is altered “by the hand of man” from its natural state. For example, an isolated polynucleotide could be part of a vector or a composition of matter, or could be contained within a cell, and still be “isolated” because that vector, composition of matter, or particular cell is not the original environment of the polynucleotide. The term “isolated” does not refer to genomic or cDNA libraries, whole cell total or mRNA preparations, genomic DNA preparations (including those separated by electrophoresis and transferred onto blots), sheared whole cell genomic DNA preparations or other compositions where the art demonstrates no distinguishing features of the polynucleotide/sequences of the present invention.

[0018] As used herein, a “polynucleotide” refers to a molecule having a nucleic acid sequence contained in SEQ ID NO:X (as described in column 1 of Table 1) or the related cDNA clone (as described in column 9 of Table 1 and contained within a library deposited with the ATCC). For example, the polynucleotide can contain the nucleotide sequence of the full length cDNA sequence, including the 5′ and 3′ untranslated sequences, the coding region, as well as fragments, epitopes, domains, and variants of the nucleic acid sequence. Moreover, as used herein, a “polypeptide” refers to a molecule having an amino acid sequence encoded by a polynucleotide of the invention as broadly defined (obviously excluding poly-Phenylalanine or poly-Lysine peptide sequences which result from translation of a polyA tail of a sequence corresponding to a cDNA).

[0019] In the present invention, “SEQ ID NO:X” was often generated by overlapping sequences contained in multiple clones (contig analysis). A representative clone containing all or most of the sequence for SEQ ID NO:X is deposited at Human Genome Sciences, Inc. (HGS) in a catalogued and archived library. As shown in column 9 of Table 1, each clone is identified by a cDNA Clone ID. Each Clone ID is unique to an individual clone and the Clone ID is all the information needed to retrieve a given clone from the HGS library. In addition to the individual cDNA clone deposits, most of the cDNA libraries from which the clones were derived were deposited at the American Type Culture Collection (hereinafter “ATCC”). Table 5 provides a list of the deposited cDNA libraries. One can use the Clone ID to determine the library source by reference to Tables 2 and 5. Table 5 lists the deposited cDNA libraries by name and links each library to an ATCC Deposit. Library names contain four characters, for example, “HTWE.” The name of a cDNA clone (“Clone ID”) isolated from that library begins with the same four characters, for example “HTWEP07”. As mentioned below, Table 1 correlates the Clone ID names with SEQ ID NOs. Thus, starting with a SEQ ID NO, one can use Tables 1, 2 and 5 to determine the corresponding Clone ID, from which library it came and in which ATCC deposit the library is contained. Furthermore, it is possible to retrieve a given cDNA clone from the source library by techniques known in the art and described elsewhere herein. The ATCC is located at 10801 University Boulevard, Manassas, Va. 20110-2209, USA. The ATCC deposits were made persuant to the terms of the Budapest Treaty on the international recognition of the deposit of microorganisms for the purposes of patent procedure.

[0020] A “polynucleotide” of the present invention also includes those polynucleotides capable of hybridizing, under stringent hybridization conditions, to sequences contained in SEQ ID NO:X, or the complement thereof (e.g., the complement of any one, two, three, four, or more of the polynucleotide fragments described herein), and/or sequences contained in the related cDNA clone within a library deposited with the ATCC. “Stringent hybridization conditions” refers to an overnight incubation at 42 degree C. in a solution comprising 50% formamide, 5× SSC (750 mM NaCl, 75 mM trisodium citrate), 50 mM sodium phosphate (pH 7.6), 5× Denhardt's solution, 10% dextran sulfate, and 20 μg/ml denatured, sheared salmon sperm DNA, followed by washing the filters in 0.1× SSC at about 65 degree C.

[0021] Also included within “polynucleotides” of the present invention are nucleic acid molecules that hybridize to the polynucleotides of the present invention at lower stringency hybridization conditions. Changes in the stringency of hybridization and signal detection are primarily accomplished through the manipulation of formamide concentration (lower percentages of formamide result in lowered stringency); salt conditions, or temperature. For example, lower stringency conditions include an overnight incubation at 37 degree C. in a solution comprising 6× SSPE (20× SSPE=3M NaCl; 0.2M NaH₂PO₄; 0.02M EDTA, pH 7.4), 0.5% SDS, 30% formamide, 100 ug/ml salmon sperm blocking DNA; followed by washes at 50 degree C. with 1×SSPE, 0.1% SDS. In addition, to achieve even lower stringency, washes performed following stringent hybridization can be done at higher salt concentrations (e.g. 5× SSC).

[0022] Note that variations in the above conditions may be accomplished through the inclusion and/or substitution of alternate blocking reagents used to suppress background in hybridization experiments. Typical blocking reagents include Denhardt's reagent, BLOTTO, heparin, denatured salmon sperm DNA, and commercially available proprietary formulations. The inclusion of specific blocking reagents may require modification of the hybridization conditions described above, due to problems with compatibility.

[0023] Of course, a polynucleotide which hybridizes only to polyA+ sequences (such as any 3′ terminal polyA+ tract of a cDNA shown in the sequence listing), or to a complementary stretch of T (or U) residues, would not be included in the definition of “polynucleotide,” since such a polynucleotide would hybridize to any nucleic acid molecule containing a poly (A) stretch or the complement thereof (e.g., practically any double-stranded cDNA clone generated using oligo dT as a primer).

[0024] The polynucleotides of the present invention can be composed of any polyribonucleotide or polydeoxribonucleotide, which may be unmodified RNA or DNA or modified RNA or DNA. For example, polynucleotides can be composed of single- and double-stranded DNA, DNA that is a mixture of single- and double-stranded regions, single- and double-stranded RNA, and RNA that is mixture of single- and double-stranded regions, hybrid molecules comprising DNA and RNA that may be single-stranded or, more typically, double-stranded or a mixture of single- and double-stranded regions. In addition, the polynucleotide can be composed of triple-stranded regions comprising RNA or DNA or both RNA and DNA. A polynucleotide may also contain one or more modified bases or DNA or RNA backbones modified for stability or for other reasons. “Modified” bases include, for example, tritylated bases and unusual bases such as inosine. A variety of modifications can be made to DNA and RNA; thus, “polynucleotide” embraces chemically, enzymatically, or metabolically modified forms.

[0025] In specific embodiments, the polynucleotides of the invention are at least 15, at least 30, at least 50, at least 100, at least 125, at least 500, or at least 1000 continuous nucleotides but are less than or equal to 300 kb, 200 kb, 100 kb, 50 kb, 15 kb, 10 kb, 7.5 kb, 5 kb, 2.5 kb, 2.0 kb, or 1 kb, in length. In a further embodiment, polynucleotides of the invention comprise a portion of the coding sequences, as disclosed herein, but do not comprise all or a portion of any intron. In another embodiment, the polynucleotides comprising coding sequences do not contain coding sequences of a genomic flanking gene (i.e., 5′ or 3′ to the gene of interest in the genome). In other embodiments, the polynucleotides of the invention do not contain the coding sequence of more than 1000, 500, 250, 100, 50, 25, 20, 15, 10, 5, 4, 3, 2, or 1 genomic flanking gene(s).

[0026] “SEQ ID NO:X” refers to a colorectal cancer antigen polynucleotide sequence described in Table 1. SEQ ID NO:X is identified by an integer specified in column 1 of Table 1. The polypeptide sequence SEQ ID NO:Y is a translated open reading frame (ORF) encoded by polynucleotide SEQ ID NO:X. There are 773 colorectal cancer antigen polynucleotide sequences described in Table 1 and shown in the sequence listing (SEQ ID NO:1 through SEQ ID NO:773). Likewise there are 773 polypeptide sequences shown in the sequence listing, one polypeptide sequence for each of the polynucleotide sequences (SEQ ID NO:774 through SEQ ID NO:1546). The polynucleotide sequences are shown in the sequence listing immediately followed by all of the polypeptide sequences. Thus, a polypeptide sequence corresponding to polynucleotide sequence SEQ ID NO:1 is the first polypeptide sequence shown in the sequence listing. The second polypeptide sequence corresponds to the polynucleotide sequence shown as SEQ ID NO:2, and so on. In otherwords, since there are 773 polynucleotide sequences, for any polynucleotide sequence SEQ ID NO:X, a corresponding polypeptide SEQ ID NO:Y can be determined by the formula X+773=Y. In addition, any of the unique “Sequence/Contig ID” defined in column two of Table 1, can be linked to the corresponding polypeptide SEQ ID NO:Y by reference to Table 4.

[0027] The polypeptides of the present invention can be composed of amino acids joined to each other by peptide bonds or modified peptide bonds, i.e., peptide isosteres, and may contain amino acids other than the 20 gene-encoded amino acids. The polypeptides may be modified by either natural processes, such as posttranslational processing, or by chemical modification techniques which are well known in the art. Such modifications are well described in basic texts and in more detailed monographs, as well as in a voluminous research literature. Modifications can occur anywhere in a polypeptide, including the peptide backbone, the amino acid side-chains and the amino or carboxyl termini. It will be appreciated that the same type of modification may be present in the same or varying degrees at several sites in a given polypeptide. Also, a given polypeptide may contain many types of modifications. Polypeptides may be branched, for example, as a result of ubiquitination, and they may be cyclic, with or without branching. Cyclic, branched, and branched cyclic polypeptides may result from posttranslation natural processes or may be made by synthetic methods. Modifications include acetylation, acylation, ADP-ribosylation, amidation, covalent attachment of flavin, covalent attachment of a heme moiety, covalent attachment of a nucleotide or nucleotide derivative, covalent attachment of a lipid or lipid derivative, covalent attachment of phosphotidylinositol, cross-linking, cyclization, disulfide bond formation, demethylation, formation of covalent cross-links, formation of cysteine, formation of pyroglutamate, formylation, gamma-carboxylation, glycosylation, GPI anchor formation, hydroxylation, iodination, methylation, myristoylation, oxidation, pegylation, proteolytic processing, phosphorylation, prenylation, racemization, selenoylation, sulfation, transfer-RNA mediated addition of amino acids to proteins such as arginylation, and ubiquitination. (See, for instance, PROTEINS—STRUCTURE AND MOLECULAR PROPERTIES, 2nd Ed., T. E. Creighton, W. H. Freeman and Company, New York (1993); POSTTRANSLATIONAL COVALENT MODIFICATION OF PROTEINS, B. C. Johnson, Ed., Academic Press, New York, pgs. 1-12 (1983); Seifter et al., Meth Enzymol 182:626-646 (1990); Rattan et al., Ann NY Acad Sci 663:48-62 (1992).)

[0028] The colorectal and/or colorectal cancer polypeptides of the invention can be prepared in any suitable manner. Such polypeptides include isolated naturally occurring polypeptides, recombinantly produced polypeptides, synthetically produced polypeptides, or polypeptides produced by a combination of these methods. Means for preparing such polypeptides are well understood in the art.

[0029] The polypeptides may be in the form of the secreted protein, including the mature form, or may be a part of a larger protein, such as a fusion protein (see below). It is often advantageous to include an additional amino acid sequence which contains secretory or leader sequences, pro-sequences, sequences which aid in purification, such as multiple histidine residues, or an additional sequence for stability during recombinant production.

[0030] The colorectal and/or colorectal cancer polypeptides of the present invention are preferably provided in an isolated form, and preferably are substantially purified. A recombinantly produced version of a polypeptide, including the secreted polypeptide, can be substantially purified using techniques described herein or otherwise known in the art, such as, for example, by the one-step method described in Smith and Johnson, Gene 67:31-40 (1988). Polypeptides of the invention also can be purified from natural, synthetic or recombinant sources using techniques described herein or otherwise known in the art, such as, for example, antibodies of the invention raised against the polypeptides of the present invention in methods which are well known in the art.

[0031] By a polypeptide demonstrating a “functional activity” is meant, a polypeptide capable of displaying one or more known functional activities associated with a full-length (complete) protein of the invention. Such functional activities include, but are not limited to, biological activity, antigenicity [ability to bind (or compete with a polypeptide for binding) to an anti-polypeptide antibody], immunogenicity (ability to generate antibody which binds to a specific polypeptide of the invention), ability to form multimers with polypeptides of the invention, and ability to bind to a receptor or ligand for a polypeptide.

[0032] “A polypeptide having functional activity” refers to polypeptides exhibiting activity similar, but not necessarily identical to, an activity of a polypeptide of the present invention, including mature forms, as measured in a particular assay, such as, for example, a biological assay, with or without dose dependency. In the case where dose dependency does exist, it need not be identical to that of the polypeptide, but rather substantially similar to the dose-dependence in a given activity as compared to the polypeptide of the present invention (i.e., the candidate polypeptide will exhibit greater activity or not more than about 25-fold less and, preferably, not more than about tenfold less activity, and most preferably, not more than about three-fold less activity relative to the polypeptide of the present invention).

[0033] The functional activity of the colorectal cancer antigen polypeptides, and fragments, variants derivatives, and analogs thereof, can be assayed by various methods.

[0034] For example, in one embodiment where one is assaying for the ability to bind or compete with full-length polypeptide of the present invention for binding to an antibody to the full length polypeptide antibody, various immunoassays known in the art can be used, including but not limited to, competitive and non-competitive assay systems using techniques such as radioimmunoassays, ELISA (enzyme linked immunosorbent assay), “sandwich” immunoassays, immunoradiometric assays, gel diffusion precipitation reactions, immunodiffusion assays, in situ immunoassays (using colloidal gold, enzyme or radioisotope labels, for example), western blots, precipitation reactions, agglutination assays (e.g., gel agglutination assays, hemagglutination assays), complement fixation assays, immunofluorescence assays, protein A assays, and immunoelectrophoresis assays, etc. In one embodiment, antibody binding is detected by detecting a label on the primary antibody. In another embodiment, the primary antibody is detected by detecting binding of a secondary antibody or reagent to the primary antibody. In a further embodiment, the secondary antibody is labeled. Many means are known in the art for detecting binding in an immunoassay and are within the scope of the present invention.

[0035] In another embodiment, where a ligand is identified, or the ability of a polypeptide fragment, variant or derivative of the invention to multimerize is being evaluated, binding can be assayed, e.g., by means well-known in the art, such as, for example, reducing and non-reducing gel chromatography, protein affinity chromatography, and affinity blotting. See generally, Phizicky, E., et al., Microbiol. Rev. 59:94-123 (1995). In another embodiment, physiological correlates polypeptide of the present invention binding to its substrates (signal transduction) can be assayed.

[0036] In addition, assays described herein (see Examples) and otherwise known in the art may routinely be applied to measure the ability of polypeptides of the present invention and fragments, variants derivatives and analogs thereof to elicit polypeptide related biological activity (either in vitro or in vivo). Other methods will be known to the skilled artisan and are within the scope of the invention.

[0037] Colorectal And/Or Colorectal Cancer Associated Polynucleotides and Polypeptides of the Invention

[0038] It has been discovered herein that the polynucleotides described in Table 1 are expressed at significantly enhanced levels in human colorectal and/or colorectal cancer tissues. Accordingly, such polynucleotides, polypeptides encoded by such polynucleotides, and antibodies specific for such polypeptides find use in the prediction, diagnosis, prevention and treatment of colon and/or rectal related disorders, including colorectal cancer as more fully described below.

[0039] Table 1 summarizes some of the polynucleotides encompassed by the invention (including contig sequences (SEQ ID NO:X) and the related cDNA clones) and further summarizes certain characteristics of these colorectal and/or colorectal cancer associated polynucleotides and the polypeptides encoded thereby.

TABLE 1

| | | | | HGS | | | | |
|---|---|---|---|---|---|---|---|---|
| Seq ID | Sequence/ | | | Nucleotide | | % | % | |
| No. | Contig ID | Gene Name | Overlap | Start | End | Id | Si | Clone ID |
| 1 | 500802 | | | 2 | 304 | | | HGBAI83 |
| 2 | 531091 | | | 2 | 292 | | | HUKDY21 |
| 3 | 553147 | Immunoglobulin kappa light chain variable | gi\|415381 | 3 | 440 | 73 | 86 | HCASG85 |
| | | region L25 [Homo sapiens] | | | | | | |
| | | >pir\|S41816\|S41816 Ig kappa chain V | | | | | | |
| | | region L25 - human Length = 119 | | | | | | |
| 4 | 558860 | (AB008790) Grb7V protein [Homo sapiens] | gnl\|PID\|d1030000 | 33 | 635 | 97 | 98 | HCEGY28 |
| | | >sp\|D1030000\|D1030000 GRB7V | | | | | | |
| | | PROTEIN. >gi\|1526535 Grb7 protein | | | | | | |
| | | [Homo sapiens] {SUB 130-343} Length = | | | | | | |
| | | 447 | | | | | | |
| 5 | 561730 | (AE039700) antigen NY-CO-38 [Homo | gi\|3170200 | 34 | 393 | 98 | 98 | HSDFA48 |
| | | sapiens] >sp\|G3170200\|G3170200 | | | | | | |
| | | ANTIGEN NY-CO-38. >gi\|3170198 | | | | | | |
| | | (AF039699) antigen NY-CO-37 [Homo | | | | | | |
| | | sapiens] {SUB 1-403} Length = 652 | | | | | | |
| 6 | 585938 | MDA-7[Homo sapiens] | gi\|1141751 | 206 | 538 | 81 | 81 | HMQBR31 |
| | | >sp\|Q13007\|MDA7_HUMAN MDA-7 | | | | | | |
| | | PROTEIN PRECURSOR (MELANOMA | | | | | | |
| | | DIFFERENTIATION ASSOCIATED | | | | | | |
| | | PROTEIN 7). Length = 206 | | | | | | |
| 7 | 587785 | disintegrin-protease [Homo sapiens] | gnl\|PID\|e332729 | 2 | 331 | 100 | 100 | HOSBO86 |
| | | >sp\|O15204\|O15204 DISINTEGRIN- | | | | | | |
| | | PROTEASE. Length = 470 | | | | | | |
| 8 | 588916 | Human apoC-II gene for | gi1296636 | 5 | 376 | 100 | 100 | HLDQU56 |
| | | preproapolipoprotein C-Il [Homo sapiens] | | | | | | |
| | | >gi\|757915 apoCII protein [Homo sapiens] | | | | | | |
| | | >gi\|178836 apolipoprotein C-II [Homo | | | | | | |
| | | sapiens] >pir\|A24238\|LPHUC2 | | | | | | |
| | | apolipoprotein C-Il precursor - human | | | | | | |
| 9 | 613825 | | | 3 | 260 | | | HMSHB03 |
| 10 | 639090 | | | 254 | 559 | | | HCRME22 |
| 11 | 651644 | | | 63 | 194 | | | HCFB073 |
| 12 | 659544 | | | 109 | 249 | | | HJMBU15 |
| 13 | 659739 | KHS1 [Homo sapiens] | gi\|1857331 | 238 | 1140 | 94 | 94 | HSYAM68 |
| | | >sp\|G1857331\|G1857331 KHS1. Length = | | | | | | |
| | | 846 | | | | | | |
| 14 | 661057 | protein kinase Dyrk2 [Homo sapiens] | gnl\|PID\|e321513 | 3 | 425 | 100 | 100 | HCDBX83 |
| | | >sp\|Q92630\|Q92630 PROTEIN KINASE | | | | | | |
| | | DYRK2 (PROTEIN KINASE, DYRK2). | | | | | | |
| | | >gnl\|PID\|e280618 Dyrk2 [Homo sapiens] | | | | | | |
| | | {SUI3 320-528} Length = 528 | | | | | | |
| 15 | 661313 | | | 894 | 1118 | | | HHEMN11 |
| 16 | 666316 | | | 193 | 369 | | | HCDCH84 |
| 17 | 669229 | | | 430 | 762 | | | HOHDD51 |
| 18 | 670471 | (AJ003061) most expressed alternative | gnl\|PID\|e1293754 | 203 | 937 | 92 | 93 | HAGGX21 |
| | | spliced form [Homo sapiens] | | | | | | |
| | | >sp\|O60852\|O60852 PROTEIN ENCODED | | | | | | |
| | | BY SACCHAROMYCES CEREVISIAE | | | | | | |
| | | SPC98 HOMOLOGUE. Length = 907 | | | | | | |
| 19 | 676611 | | | 207 | 530 | | | HCE5C73 |
| 20 | 691240 | | | 2 | 385 | | | HISAN54 |
| 21 | 702977 | 26-kDa cell surface protein TAPA-1 [Homo | gi\|338678 | 34 | 819 | 80 | 80 | HGCMV09 |
| | | sapiens] >pir\|A35649\|A35649 cell surface | | | | | | |
| | | protein TAPA-1 - human | | | | | | |
| | | >sp\|P18582\|CD81_HUMAN CD81 | | | | | | |
| | | ANTIGEN (26 KD CELL SURFACE | | | | | | |
| | | PROTEIN TAPA-1). Length = 236 | | | | | | |
| 22 | 709517 | | | 344 | 478 | | | HWLIX38 |
| 23 | 714730 | (AF062476) retinoic acid-responsive | gi\|3126975 | 1 | 534 | 75 | 88 | HCRND05 |
| | | protein; STRA6 [Mus musculus] | | | | | | |
| | | >sp\|O70491\|O70491 RETINOIC ACID- | | | | | | |
| | | RESPONSIVE PROTEIN. Length = 670 | | | | | | |
| 24 | 714834 | | | 1 | 657 | | | HAPTL75 |
| 25 | 715016 | | | 1 | 411 | | | HCEOQ15 |
| 26 | 719584 | (AF076856) small espin [Rattus norvegicus] | gi\|3818569 | 530 | 886 | 62 | 64 | HWLFA47 |
| | | >sp\|G3818569\|G3818569 SMALL ESPIN. | | | | | | |
| | | Length = 253 | | | | | | |
| 27 | 724637 | muskelin [Mus musculus] | gi\|3493462 | 1 | 444 | 92 | 95 | HUSXP30 |
| | | >sp\|O89050\|O89050 MUSKELIN. Length = | | | | | | |
| | | 735 | | | | | | |
| 28 | 728392 | (AB015318) gamma2-adaptin [Homo | gnl\|PID\|d1034356 | 160 | 801 | 100 | 100 | HBJ1G25 |
| | | sapiens] >sp\|O75843\|O75843 GAMMA2- | | | | | | |
| | | ADAPTIN. Length = 785 | | | | | | |
| 29 | 738716 | | | 137 | 289 | | | HCRMQ71 |
| 30 | 739056 | similar to ADP-ribosylation factor; | gnl\|PID\|e1350748 | 2 | 502 | 87 | 97 | HSDZB27 |
| 31 | 739143 | (AF054179) H beta 58 homolog [Homo | gi\|3342000 | 1 | 1083 | 100 | 100 | HKABV36 |
| | | sapiens] >sp\|O75436\|O75436 H BETA 58 | | | | | | |
| | | HOMOLOG. Length = 327 | | | | | | |
| 32 | 742329 | | | 2 | 277 | | | HSRDE23 |
| 33 | 742557 | | | 2 | 814 | | | HWHGD94 |
| 34 | 745481 | | | 1229 | 1396 | | | HPMFL67 |
| 35 | 746035 | | | 414 | 959 | | | HCHCJ20 |
| 36 | 753731 | | | 1 | 357 | | | HPTTL69 |
| 37 | 754383 | | | 3 | 434 | | | HBGMG69 |
| 38 | 756749 | | | 3 | 464 | | | HMEJZ19 |
| 39 | 757980 | | | 365 | 622 | | | HETIS94 |
| 40 | 764818 | | | 3 | 1700 | | | HCE4A59 |
| 41 | 765140 | | | 3 | 200 | | | HRODG74 |
| 42 | 766893 | | | 178 | 414 | | | HCEOS64 |
| 43 | 771338 | (AF034745) LNXp80 [Mus musculus] | gi\|3041879 | 1 | 681 | 91 | 96 | HCQDR53 |
| | | >sp\|O70263\|O70263 LIGAND OF NUMB- | | | | | | |
| | | PROTEIN X (LNXP80). Length = 728 | | | | | | |
| 44 | 771412 | | | 2 | 601 | | | HCHAG61 |
| 45 | 772226 | (AF011794) cell cycle progression | gi\|2352906 | 3 | 257 | 100 | 100 | HMVCR68 |
| | | restoration 8 protein [Homo sapiens] | | | | | | |
| | | >sp\|O14712\|O14712 CELL CYCLE | | | | | | |
| | | PROGRESSION RESTORATION 8 | | | | | | |
| | | PROTEIN. Length = 375 | | | | | | |
| 46 | 773057 | | | 36 | 236 | | | HE2BE05 |
| 47 | 773173 | | | 514 | 693 | | | HTEPE82 |
| 48 | 780154 | | | 44 | 820 | | | HCEZWS2 |
| 49 | 780768 | | | 1176 | 1352 | | | HPLBS64 |
| 50 | 780779 | similar to G9a gene. [Homo sapiens] | gnl\|PID\|d1007261 | 134 | 658 | 86 | 86 | HAMFL51 |
| | | >sp\|Q15047\|Q15047 MRNA (KIAA0067) | | | | | | |
| | | FOR ORF (RELATED TO G9A GENE), | | | | | | |
| | | COMPLETE CDS (KIAA0067). Length = | | | | | | |
| | | 1291 | | | | | | |
| 51 | 782394 | | | 1068 | 1337 | | | HDLBC18 |
| 52 | 783160 | (AF026977) microsomal glutathione 5- | gi\|2583081 | 25 | 492 | 100 | 100 | HE9PG68 |
| | | transferase 3 [Homo sapiens] | | | | | | |
| | | >sp\|O14880\|O14880 MICROSOMAL | | | | | | |
| | | GLUTATHIONE 5-TRANSFERASE 3. | | | | | | |
| | | Length = 152 | | | | | | |
| 53 | 783506 | | | 49 | 825 | | | HODCW56 |
| 54 | 784446 | | | 19 | 282 | | | HBJFL85 |
| 55 | 784832 | | | 134 | 751 | | | HCGMI84 |
| 56 | 786813 | | | 114 | 347 | | | HE2O155 |
| 57 | 792139 | (AB002086) p47 [Rattus norvegicus] | gnl\|PID\|d1022509 | 32 | 334 | 83 | 85 | H6EEC65 |
| | | >gnl\|PID\|e294068 XY40 protein [Rattus | | | | | | |
| | | norvegicus] >sp\|O35987\|O35987 P47, | | | | | | |
| | | COMPLETE CDS. Length = 370 | | | | | | |
| 58 | 793987 | | | 100 | 564 | | | HCIAE18 |
| 59 | 805715 | | | 513 | 1226 | | | HDPKI64 |
| 60 | 811111 | | | 1 | 438 | | | HCEDF72 |
| 61 | 811113 | steroidogenic acute regulatory protein [Mus | gi\|1236243 | 2 | 718 | 28 | 50 | HWBEX78 |
| | | musculus]>pir\|A55455\|A55455 | | | | | | |
| | | steroidogenic acute regulatory protein | | | | | | |
| | | precursor, mitochondrial - mouse Length = | | | | | | |
| | | 284 | | | | | | |
| 62 | 823902 | (AF028722) fetal globin inducing factor | gi\|4103857 | 36 | 497 | 87 | 94 | HDTBD43 |
| | | [Mus musculus] >sp\|G4103857\|G4103857 | | | | | | |
| | | FETAL GLOBIN INDUCING FACTOR. | | | | | | |
| | | Length = 238 | | | | | | |
| 63 | 826518 | RNase 4 [Homo sapiens] >pir\|I52489\|I52489 | gnl\|PID\|d1007727 | 1 | 231 | 100 | 100 | HLQCQ62 |
| | | ribonuclease 4 (BC 3.1.−.−) precursor - | | | | | | |
| | | human Length = 147 | | | | | | |
| 64 | 826704 | | | 475 | 726 | | | HCQBI18 |
| 65 | 827720 | | | 789 | 1076 | | | HFICY86 |
| 66 | 828102 | | | 106 | 297 | | | HSRFC02 |
| 67 | 828180 | (AB013456) aquaporin 8 [Homo sapiens] | gnl\|PID\|d1035202 | 20 | 883 | 83 | 83 | HWLFM26 |
| | | >gnl\|PID\|d1035202 (AB013456) aquaporin | | | | | | |
| | | 8 [Homo sapiens] >sp\|D1035202\|D1035202 | | | | | | |
| | | AQUAPORIN 8. Length = 261 | | | | | | |
| 68 | 828386 | (AF093821) RRM RNA binding protein | gi\|3695986 | 3 | 650 | 100 | 100 | HOHAD26 |
| | | gi\|3694986 GRY-RBP [Mus musculus] | | | | | | |
| | | >sp\|O88991\|O88991 RRM RNA BINDING | | | | | | |
| | | PROTEIN GRY-RBP. Length = 625 | | | | | | |
| 69 | 828658 | protein-tyrosine-phosphatase [Homo | gnl\|PID\|e218263 | 2 | 568 | 100 | 100 | HLHC024 |
| | | sapiens] >gnl\|PID\|d1032930 (AB013601) | | | | | | |
| | | DUSP6 [Homo sapiens] >gnl\|PID\|d1035350 | | | | | | |
| | | (AB013382) DUSP6 [Homo sapiens] | | | | | | |
| | | >gnl\|PID\|d1032930 (AB013601) DUSP6 | | | | | | |
| | | [Homo sapiens] | | | | | | |
| | | >sp\|Q16828\|DUS6_HUMAN DUAL | | | | | | |
| | | SPECIFICITY PROTEIN PHOSPHATASE | | | | | | |
| | | 6 | | | | | | |
| 70 | 828919 | RNA helicase [Homo sapiens] | gnl\|PID\|e254454 | 2 | 661 | 99 | 100 | HFOYL30 |
| | | >pir\|S71758\|S717S8 DEAD box protein | | | | | | |
| | | MrDb, Myc-regulated - human | | | | | | |
| | | >sp\|Q92732\|Q92732 RNA HELICASE. | | | | | | |
| | | Length = 610 | | | | | | |
| 71 | 829572 | | | 163 | 411 | | | HSVAK51 |
| 72 | 830138 | similar to Glyoxalase [Caenorhabditis | gnl\|PID\|\|e1344082 | 134 | 475 | 53 | 67 | HYAAH90 |
| | | elegans] Length = 281 | | | | | | |
| 73 | 830208 | UbcH5B [Homo sapiens] >gi\|595668 | gi\|1145689 | 2 | 205 | 92 | 95 | HIBCN46 |
| | | ubiquitin conjugating enzyme [Rattus | | | | | | |
| | | norvegicus]> gi\|1480742 ubiquitin | | | | | | |
| | | conjugating enzyme [Mus musculus] | | | | | | |
| | | >pir\|553359\|553359 ubiquitin conjugating | | | | | | |
| | | enzyme (E217kB) - rat Length = 147 | | | | | | |
| 74 | 830248 | A33 antigen precursor [Homo sapiens] | gi\|1814277 | 3 | 1097 | 30 | 39 | HWLHJ13 |
| | | >sp\|Q99795\|A33_HUMAN CELL | | | | | | |
| | | SURFACE A33 ANTIGEN PRECURSOR. | | | | | | |
| | | Length = 319 | | | | | | |
| 75 | 830275 | Similar to D. melanogaster parallel sister | gnl\|PID\|d1014081 | 3 | 647 | 100 | 100 | HWLF028 |
| | | chromatids protein [Homo sapiens] | | | | | | |
| | | >sp\|Q92549\|Q92549 MYELOBLAST | | | | | | |
| | | KIAA0261 (FRAGMENT). Length = 1287 | | | | | | |
| 76 | 830286 | interferon-related putative protein [Homo | gi\|2880033 | 385 | 1488 | 91 | 91 | HWLFE46 |
| | | sapiens] >sp\|Q12894\|Q12894 | | | | | | |
| | | HYPOTHETICAL 48.0 KD PROTEIN. | | | | | | |
| | | >gi\|1209022 interferon-related putative | | | | | | |
| | | protein [Homo sapiens] {SUB 2-442} | | | | | | |
| | | Length = 442 | | | | | | |
| 77 | 830347 | (AF039401) calcium-dependent chloride | gi\|4009460 | 3 | 656 | 63 | 76 | HWLEL81 |
| | | channel-1 [Homo sapiens] | | | | | | |
| | | >sp\|G4009460\|G4009460 CALCIUM- | | | | | | |
| | | DEPENDENT CHLORIDE CHANNEL-1. | | | | | | |
| | | Length = 914 | | | | | | |
| 78 | 830348 | | | 3 | 911 | | | HWHQR45 |
| 79 | 830364 | inorganic pyrophosphatase (EC 3.6.1.1) - | pir\|A45153\|A4515 | 3 | 1022 | 67 | 85 | IIWLEI47 |
| | | bovine >sp\|P37980\|WYR_BOVIN | 3 | | | | | |
| | | INORGANIC PYROPHOSPHATASE (EC | | | | | | |
| | | 3.6.1.1) (PYROPHOSPHATE PHOSPHO- | | | | | | |
| | | HYDROLASE) (PPASE). Length = 289 | | | | | | |
| 80 | 830394 | | | 1 | 951 | | | HDPVF62 |
| 81 | 830398 | | | 526 | 627 | | | HWBCR84 |
| 82 | 830412 | SDF2 [Homo sapiens] >pir\|JC51O6\|JC5106 | gnl\|PID\|d1009953 | 233 | 928 | 91 | 92 | HWHHQ57 |
| | | stromal cell-derived factor 2 - human | | | | | | |
| | | >sp\|Q99470\|Q99470 SDF2. Length = 211 | | | | | | |
| 83 | 830436 | (AJ005821) X-like 1 protein [Homo | gnl\|PID\|e1291794 | 83 | 523 | 65 | 78 | HWABR83 |
| | | sapiens] >sp\|E1291794\|E1291794 X-LIKE 1 | | | | | | |
| | | PROTEIN. Length = 3027 | | | | | | |
| 84 | 830464 | CLP36 [Rattus norvegicus] | gi\|1020151 | 2 | 289 | 72 | 81 | HUSGB72 |
| | | >pir\|JC4385\|JC4385 LIM protein - rat | | | | | | |
| | | >sp\|P52944\|CL36_RAT LIM PROTEIN | | | | | | |
| | | CLP36. Length = 327 | | | | | | |
| 85 | 830471 | | | 95 | 229 | | | HUSIK51 |
| 86 | 830477 | (AFO11794) cell cycle progression | gi\|2352906 | 116 | 2389 | 95 | 96 | HULAT84 |
| | | restoration 8 protein [Homo sapiens] | | | | | | |
| | | >sp\|O14712\|O14712 CELL CYCLE | | | | | | |
| | | PROGRESSION RESTORATION 8 | | | | | | |
| | | PROTEIN. Length = 375 | | | | | | |
| 87 | 830500 | ORF YGRO36c [Saccharomyces cerevisiae] | gnl\|PID\|e243385 | 185 | 736 | 38 | 54 | HJPCP29 |
| | | >pir\|S64327\|S64327 probable membrane | | | | | | |
| | | protein YGR036c - yeast (Saccharomyces | | | | | | |
| | | cerevisiae) Length = 239 | | | | | | |
| 88 | 830509 | (AL021813) phenylalanyl-trna synthetase | gnl\|PID\|e1250585 | 2 | 1081 | 40 | 63 | HUFAU68 |
| | | alpha chain [Schizosaccharomyces pombe] | | | | | | |
| | | >sp\|O42849\|O42849 PHENYLALANYL- | | | | | | |
| | | TRNA SYNTHETASE ALPHA CHAIN. | | | | | | |
| | | Length = 589 | | | | | | |
| 89 | 830528 | hepatoma-derived growth factor [Mus | dbj\|D63850_1 | 38 | 1591 | 78 | 87 | HUFBF32 |
| | | musculus] >pir\|JC5662\|JC5662 hepatoma- | | | | | | |
| | | derived growth factor-related protein 2 - | | | | | | |
| | | mouse >sp\|O35540\|O35540 HEPATOMA- | | | | | | |
| | | DERIVED GROWTH FACTOR, | | | | | | |
| | | RELATED PROTEIN 2. Length = 669 | | | | | | |
| 90 | 830542 | mitochondrial 3-oxoacyl-CoA thiolase | gnl\|PID\|d1004316 | 324 | 1637 | 92 | 92 | HTTD045 |
| | | [Homo sapiens] >pir\|S43440\|S43440 3- | | | | | | |
| | | oxoacyl-CoA thiolase - human Length = 397 | | | | | | |
| 91 | 830564 | | | 702 | 1343 | | | HTPBU79 |
| 92 | 830611 | IgM heavy chain VH1 region precursor | gi\|2344934 | 1 | 495 | 78 | 79 | HTJMB28 |
| | | [Homo sapiens] Length = 146 | | | | | | |
| 93 | 830618 | | | 655 | 915 | | | HDTMI21 |
| 94 | 830620 | | | 452 | 754 | | | HTGDM95 |
| 95 | 830630 | mitochondrial benzodiazepine receptor | gi\|529946 | 14 | 259 | 100 | 100 | HTGFS43 |
| | | [Homo sapiens] >pir\|38724\|38724 | | | | | | |
| | | mitochondrial benzodiazepine receptor - | | | | | | |
| | | human >gi\|3411163 (AF075589) peripheral- | | | | | | |
| | | type benzodiazepine receptor [Homo | | | | | | |
| | | sapiens] {SUB 27-169} Length = 169 | | | | | | |
| 96 | 830654 | RNA-binding protein [Saccharomyces | gi\|295631 | 2 | 1687 | 40 | 51 | HSYBQ96 |
| | | cerevisiae] Length = 497 | | | | | | |
| 97 | 830660 | | | 122 | 694 | | | HSYDW13 |
| 98 | 830661 | | | 555 | 779 | | | HSXDG80 |
| 99 | 830704 | pp21 [Homo sapiens] >pir\|153785\|153785 | gi\|521207 | 1 | 609 | 51 | 76 | HSUSF13 |
| | | gene pp21 protein - human | | | | | | |
| | | >sp\|Q15170\|Q15170 (PP21). Length = 157 | | | | | | |
| 100 | 830765 | | | 39 | 236 | | | HSKES11 |
| 101 | 830778 | methionine aminopeptidase [Homo sapiens] | gi\|903982 | 26 | 718 | 99 | 100 | HSPAX18 |
| | | >gi\|687243 eIF-2-associated p67 homolog | | | | | | |
| | | [Homo sapiens] >pir\|SS2112\|DPHUM2 | | | | | | |
| | | methionyl aminopeptidase (EC 3.4.11.18) 2 | | | | | | |
| | | - human >sp\|P50579\|AMP2_HUMAN | | | | | | |
| | | METHIONINE AMINOPEPTIDASE 2 (EC | | | | | | |
| | | 3.4.11.18) (METAP 2) (PEPTIDASE M 2) | | | | | | |
| 102 | 830784 | | | 595 | 858 | | | HSIFY77 |
| 103 | 830800 | (AF039918) CD39L4 [Homo sapiens] | gi\|3335102 | 1 | 990 | 94 | 94 | HHPDD94 |
| | | >sp\|O75356\|O75356 CD39L4. Length = 428 | | | | | | |
| 104 | 830821 | | | 449 | 754 | | | HAQND53 |
| 105 | 830849 | | | 464 | 868 | | | HHEAA48 |
| 106 | 830903 | | | 1 | 525 | | | HPJCT75 |
| 107 | 830913 | tumor necrosis factor type 1 receptor | gi\|687237 | 3 | 1193 | 99 | 99 | HPIBH48 |
| | | associated protein [Homo sapiens] | | | | | | |
| | | >pir\|A558771A55877 tumor necrosis factor | | | | | | |
| | | type 1 receptor associated protein TRAP-1- | | | | | | |
| | | human | | | | | | |
| 108 | 830920 | microsomal glutathione 5-transferase 2 | gi\|1747521 | 90 | 650 | 87 | 87 | HPHAA84 |
| | | [Homo sapiens] | | | | | | |
| | | >sp\|Q99735 \|GST2_HUMAN | | | | | | |
| | | MICROSOMAL GLUTATHIONE S- | | | | | | |
| | | TRANSFERASE II (EC 2.5.1.18) | | | | | | |
| | | (MICROSOMAL GST-II). Length = 147 | | | | | | |
| 109 | 830938 | peroxisome proliferator activated receptor | gi\|1432177 | 227 | 610 | 98 | 98 | HONAE45 |
| | | gamma 2 [Homo sapiens] >gi\|1711117 | | | | | | |
| | | ligand activated transcription factor | | | | | | |
| | | PPARgamma2 [Homo sapiens] | | | | | | |
| 110 | 830980 | beta COP [Rattus norvegicus] | gi\|55819 | 47 | 289 | 95 | 98 | HCESG53 |
| | | >pir\|S13521\|S13520 beta-COP protein - rat | | | | | | |
| | | >sp\|P23514\|COPB_RAT COATOMER | | | | | | |
| | | BETA SUBUNIT (BETA-COAT | | | | | | |
| | | PROTEIN) (BETA-COP). | | | | | | |
| | | >pir\|513636\|S13636 110K protein - rabbit | | | | | | |
| | | {SUB 451-500} Length = 953 | | | | | | |
| 111 | 831014 | (AF016687) similar to alpha-actinin | gi\|2315828 | 310 | 1188 | 53 | 73 | HOEBV08 |
| | | [Caenorhabditis elegans] | | | | | | |
| | | >sp\|O16785\|O16785 T21D12.4 PROTEIN. | | | | | | |
| | | Length = 375 | | | | | | |
| 112 | 831026 | | | 340 | 687 | | | HOBAE30 |
| 113 | 831031 | | | 526 | 765 | | | HTXOK56 |
| 114 | 831055 | (AF091395) Trio isoform [Homo sapiens] | gi\|3644048 | 674 | 1921 | 93 | 94 | HNTAT24 |
| | | >sp\|O75962\|O75962 TRIO ISOFORM. | | | | | | |
| | | Length = 3038 | | | | | | |
| 115 | 831057 | | | 3 | 1106 | | | HNTCW73 |
| 116 | 831062 | | | 3 | 821 | | | HNTBD04 |
| 117 | 831117 | | | 400 | 579 | | | HMWBR70 |
| 118 | 831122 | cell surface glycoprotein [Homo sapiens] | gi\|179312 | 2 | 772 | 91 | 92 | HMWCV70 |
| | | >gi\|567110 [Human CD79b/Ig beta/B29 | | | | | | |
| | | gene, complete coding sequence.], gene | | | | | | |
| | | product [Homo sapiens] >bbs\|122035 | | | | | | |
| | | membrane immunoglobulin beta chain, Ig- | | | | | | |
| | | beta = Ag receptor complex [human, B cells, | | | | | | |
| | | Peptide, 229 aa] [Homo | | | | | | |
| 119 | 831125 | | | 868 | 1023 | | | HMWFH12 |
| 120 | 831132 | | | 36 | 185 | | | HMUAR55 |
| 121 | 831152 | (AC004668) similar to murine cell cycle | gi\|3115346 | 111 | 875 | 90 | 91 | HMVAI57 |
| | | regulator MIDA1; similar to A57591 | | | | | | |
| | | (PID:g2137417) [Homo sapiens] | | | | | | |
| | | >sp\|O6O414\|O60414 | | | | | | |
| | | WUGSC:H_RG276003.1A PROTEIN | | | | | | |
| | | (FRAGMENT). Length = 635 | | | | | | |
| 122 | 831157 | (AF030109) regulator of G protein signaling | gi\|2605780 | 664 | 1110 | 100 | 100 | HMVAA24 |
| | | 12 [Homo sapiens] >gi\|2766633 | | | | | | |
| | | (AF030152) regulator of G protein signaling | | | | | | |
| | | 12 [Homo sapiens] Length = 799 | | | | | | |
| 123 | 831160 | ezrin (AA 1-586) [Homo sapiens] | gi\|31283 | 3 | 1907 | 100 | 100 | HCRPE60 |
| | | >pir\|A34400\|A34400 ezrin - human | | | | | | |
| | | >sp\|P15311\|EZRI_HUMAN EZRIN (P81) | | | | | | |
| | | (CYTOVILLIN) (VILLIN-2). {SUB 2-586} | | | | | | |
| | | >gi\|340217 cytovillin 2 [Homo sapiens] | | | | | | |
| | | {SUB 12-585} Length = 586 | | | | | | |
| | | {SUB 12-5861 Length = 586 | | | | | | |
| 124 | 831193 | | | 256 | 378 | | | HMIAG77 |
| 125 | 831197 | | | 884 | 1267 | | | HMELQ02 |
| 126 | 831217 | | | 152 | 427 | | | HTAAN07 |
| 127 | 831239 | | | 420 | 638 | | | HAKBB67 |
| 128 | 831248 | | | 84 | 443 | | | HCFLL08 |
| 129 | 831313 | c-fos protein [Homo sapiens] >gi\|29904 c- | gi\|182735 | 1182 | 1670 | 83 | 88 | HAGDZ30 |
| | | fos gene product [Homo sapiens] | | | | | | |
| | | >gi\|4063509 (AF111167) cfos [Homo | | | | | | |
| | | sapiens] >pir\|A01342\|TVHUF1 | | | | | | |
| | | transforming protein fos - human | | | | | | |
| | | >sp\|P01100\|FOS_HUMAN P55-C-FOS | | | | | | |
| | | PROTO-ONCOGENE PROTEIN (G057 | | | | | | |
| | | PROTEIN). >sp\|G4063509\|G406 | | | | | | |
| 130 | 831369 | | | 31 | 1464 | | | HDFQB94 |
| 131 | 831371 | | | 81 | 344 | | | HLADA28 |
| 132 | 831373 | cytochrome P450j [Homo sapiens] | gi\|181360 | 221 | 1744 | 94 | 94 | HWADP47 |
| | | >gi\|181356 cytochrome P450IIE1 [Homo | | | | | | |
| | | sapiens] >pir\|A31949\|A31949 cytochrome | | | | | | |
| | | P450 2E1 - human | | | | | | |
| | | >sp\|P05181\|CPE1_HUMAN | | | | | | |
| | | CYTOCHROME P450 2E1 (EC 1.14.14.1) | | | | | | |
| | | (CYPIIE1) (P450-J). >gnl\|PID\|d001366 | | | | | | |
| | | cytochrome P450IIE1 [Homo sapiens] | | | | | | |
| 133 | 831387 | hydroxymethylglutaryl-CoA synthase | gi\|619877 | 717 | 1586 | 100 | 100 | HWLLY45 |
| | | [Homo sapiens] >gi\|2463646 3-hydroxy-3- | | | | | | |
| | | methyiglutaryl CoA synthase [Homo | | | | | | |
| | | sapiens] >pir\|S71623\|571623 | | | | | | |
| | | hydroxymethylglutaryl-CoA synthase (EC | | | | | | |
| | | 4.1.3.5) precursor, mitochondrial - human | | | | | | |
| | | >sp\|P54868\|HMCM_HUMAN | | | | | | |
| | | HYDROXYMETHYLGLU | | | | | | |
| 134 | 831410 | mucin 2 precursor, intestinal - human | pir\|A49963\|A4393 | 2 | 727 | 95 | 96 | HCQDM23 |
| | | (fragments) >gi\|186396 mucin [Homo | 2 | | | | | |
| | | sapiens] {SUB 626-1895} >gi\|186398 | | | | | | |
| | | MUC2 [Homo sapiens] {SUB 2037-3020} | | | | | | |
| | | >gil\|88874 intestinal mucin [Homo sapiens] | | | | | | |
| | | {SUB 1916-2193} >gi\|188615 mucin-like | | | | | | |
| | | protein [Homo sapiens] {SUB 23 | | | | | | |
| 135 | 831448 | calcium-modulated protein S 100-beta | gi\|554574 | 126 | 482 | 32 | 60 | HKAC081 |
| | | [artificial sequence]>pir\|A91254\|BCBOIB | | | | | | |
| | | S-100 protein beta chain - bovine {SUB 2- | | | | | | |
| | | 92} Length = 92 | | | | | | |
| 136 | 831450 | | | 807 | 1319 | | | HKABK55 |
| 137 | 831472 | | | 1 | 138 | | | HJMBH59 |
| 138 | 831473 | (AF020043) chromosome-associated | gi\|3089368 | 40 | 3765 | 89 | 89 | HKACE68 |
| | | polypeptide [Homo sapiens] | | | | | | |
| | | >sp\|O60464\|O60464 CHROMOSOME- | | | | | | |
| | | ASSOCIATED POLYPEPTIDE | | | | | | |
| | | (BAMACAN PROTEIN). | | | | | | |
| | | >gnl\|PID\|e1285055 (AJ005015) bamacan | | | | | | |
| | | protein [Homo sapiens] {SUB 827-1217} | | | | | | |
| | | Length = 1217 | | | | | | |
| 139 | 831474 | | | 1231 | 1746 | | | HWHPX60 |
| 140 | 831494 | | | 2 | 616 | | | HISES08 |
| 141 | 831506 | excision repair protein [Homo sapiens] | gi\|182177 | 3 | 596 | 100 | 100 | HICAF79 |
| | | >gi\|182174 excision repair protein [Homo | | | | | | |
| | | sapiens] >gi\|2583146 (AF001925) excision | | | | | | |
| | | repair protein [Homo sapiens] | | | | | | |
| | | >pir\|A3 2875\|A24781 excision repair protein | | | | | | |
| | | - human >sp\|P07992\|ERC1_HUMAN DNA | | | | | | |
| | | EXCISION REPAIR PROTEIN ERC | | | | | | |
| 142 | 831533 | similar to yeast adenylate cyclase (556776) | gnl\|PID\|d1013909 | 1 | 900 | 51 | 69 | HCRPH87 |
| | | [Homo sapiens] >sp\|Q92627\|Q92627 | | | | | | |
| | | MYELOBLAST KIAA0231 | | | | | | |
| | | (FRAGMENT). Length = 476 | | | | | | |
| 143 | 831539 | growth and transformation dependent | gi\|207250 | 102 | 572 | 81 | 97 | HDTIT02 |
| | | protein [Rattus norvegicus] | | | | | | |
| | | >pir\|A26882\|A26882 pIL2 hypothetical | | | | | | |
| | | protein - rat (fragment) >sp\|Q63571\|Q63571 | | | | | | |
| | | RAT GROWTH AND | | | | | | |
| | | TRANSFORMATION-DEPENDENT | | | | | | |
| | | (FRAGMENT). Length = 175 | | | | | | |
| 144 | 831556 | | | 395 | 625 | | | HDTLJ87 |
| 145 | 831594 | | | 117 | 677 | | | HHECU01 |
| 146 | 831598 | protein serine/threonine kinase [Homo | gi\|348243 | 23 | 802 | 99 | 99 | HHED014 |
| | | sapiens] >gi\|468789 CDK activating kinase | | | | | | |
| | | [Homo sapiens] >gi\|485909 MO15/CDK- | | | | | | |
| | | activating kinase (CAK) [Homo sapiens] | | | | | | |
| | | >gnl\|PID\|e2578O6 Cdk-activating kinase | | | | | | |
| | | [Homo sapiens] >pir\|A54820\|A54820 CDK- | | | | | | |
| | | activating protein kinas | | | | | | |
| 147 | 831608 | translational initiation factor beta subunit | gi\|182067 | 120 | 1154 | 87 | 87 | HHEFB46 |
| | | [Homo sapiens] >pir\|A31226\|A31226 | | | | | | |
| | | translation initiation factor eIF-2 beta chain - | | | | | | |
| | | human >pir\|S13147\|S13147 protein | | | | | | |
| | | synthesis factor - rabbit | | | | | | |
| | | >sp\|P20042\|IF2B_HUMAN EUKARYOTIC | | | | | | |
| | | TRANSLATION INITIATION FACTOR 2 | | | | | | |
| | | BET | | | | | | |
| 148 | 831613 | Human giant larvae homologue [Homo | gi\|854124 | 3 | 104 | 96 | 100 | HISAU33 |
| | | sapiens] >pir\|S55474\|S55474 Human giant | | | | | | |
| | | larvae homolog - human | | | | | | |
| | | >sp\|Q14521\|Q14521 GIANT LARVAE | | | | | | |
| | | HOMOLOGUE. Length = 1015 | | | | | | |
| 149 | 831622 | alpha 1-acid glycoprotein [Homo sapiens] | gnl\|PID\|e222211 | 46 | 690 | 99 | 99 | HGBHZ56 |
| | | >gi\|1340138 alpha 1-acid glycoprotein | | | | | | |
| | | [Homo sapiens] {SUB 39-86} Length = 201 | | | | | | |
| 150 | 831631 | aldose reductase-like peptide [Homo | gi\|3150035 | 100 | 1173 | 100 | 100 | HGBAX75 |
| | | sapiens] >sp\|O60218\|O60218 ALDOSE | | | | | | |
| | | REDUCTASE-LIKE PEPTIDE (ALDOSE | | | | | | |
| | | REDUCTASE-RELATED PROTEIN). | | | | | | |
| | | >gi\|3098514 (AF044961) aldose reductase- | | | | | | |
| | | related protein [Homo sapiens] {SUB 232- | | | | | | |
| | | 316} Length = 316 | | | | | | |
| 151 | 831632 | | | 2 | 226 | | | HGBCC19 |
| 152 | 831653 | lambda-crystallin precursor [Oryctolagus | gi\|164905 | 172 | 927 | 85 | 90 | HTJNI73 |
| | | cuniculus] >pir\|A31992\|A31992 lambda- | | | | | | |
| | | crystallin - rabbit | | | | | | |
| | | >sp\|P14755\|CRYL_RABIT LAMBDA- | | | | | | |
| | | CRYSTALLIN. {SUB 2-320} Length = 320 | | | | | | |
| 153 | 831655 | weak similarity to TPR domains | gi\|1465826 | 3 | 662 | 32 | 54 | HFVHF47 |
| | | [Caenorhabditis elegans] | | | | | | |
| | | >sp\|Q23049\|Q23049 SIMILARITY TO TPR | | | | | | |
| | | DOMAINS. Length = 458 | | | | | | |
| 154 | 831708 | vascular endothelial growth factor [Homo | gi\|3712671 | 96 | 410 | 98 | 100 | HFTUT25 |
| | | sapiens] >sp\|Q16889\|Q16889 VASCULAR | | | | | | |
| | | ENDOTHELIAL GROWTH FACTOR | | | | | | |
| | | (FRAGMENT). >pir\|A41551\|A41551 | | | | | | |
| | | vascular endothelial growth factor 206 | | | | | | |
| | | precursor - human {SUB 23-254} | | | | | | |
| | | >bbs\|85194 vascular endothelial growth | | | | | | |
| | | factor; VEGF | | | | | | |
| 155 | 831738 | | | 313 | 573 | | | HFCAI79 |
| 156 | 831741 | myelodysplasia/myeloid leukemia factor 2 | gi\|1399745 | 186 | 974 | 77 | 77 | HFEBT03 |
| | | [Homo sapiens] >gi\|3387897 (AF070539) | | | | | | |
| | | myelodysplasia/myeloid leukemia factor 2 | | | | | | |
| | | [Homo sapiens] >sp\|Q15773\|Q15773 | | | | | | |
| | | MYELODYSPLASLA/MYELOID | | | | | | |
| | | LEUKEMIA FACTOR 2. Length = 248 | | | | | | |
| 157 | 831754 | multidrug resistance protein 3 [Homo | gn\|PID\|e1288198 | 1 | 924 | 92 | 92 | HWMEZ67 |
| | | sapiens] >gnl\|PID\|e1288198 multidrug | | | | | | |
| | | resistance protein 3 [Homo sapiens] | | | | | | |
| | | >sp\|060922\|060922 MULTIIDRUG | | | | | | |
| | | RESISTANCE PROTEIN 3. Length = 1526 | | | | | | |
| 158 | 831760 | | | 373 | 510 | | | HETEH76 |
| 159 | 831780 | | | 2 | 1003 | | | HELGH58 |
| 160 | 831796 | | | 892 | 1158 | | | HE9RYS4 |
| 161 | 831800 | nuclear protein SA-2 [Homo sapiens] | gnl\|PID\|e250094 | 600 | 1541 | 93 | 93 | HFIAUS9 |
| | | >sp\|O00540\|O00540 NUCLEAR PROTEIN | | | | | | |
| | | SA-2. Length = 1162 | | | | | | |
| 162 | 831807 | | | 1015 | 1341 | | | HE9QD17 |
| 163 | 831812 | | | 520 | 765 | | | HE9OY91 |
| 164 | 831813 | | | 83 | 793 | | | HEAHA84 |
| 165 | 831830 | isoleucyl-tRNA synthetase [Homo sapiens] | gnl\|PID\|d1006382 | 52 | 2307 | 98 | 99 | HE8TV13 |
| | | >pir\|1593141\|I59314 isoleucine-tRNA ligase | | | | | | |
| | | (EC 6.1.1.5) - human Length = 1266 | | | | | | |
| 166 | 831860 | Similarity to S. Pombe BEM1/BUD5 | gnl\|PID\|e1347870 | 465 | 776 | 69 | 84 | HE80T93 |
| | | suppressor; | | | | | | |
| 167 | 831872 | | | 1 | 1671 | | | HE8CL14 |
| 168 | 831896 | | | 1 | 2121 | | | HDTDX05 |
| 169 | 831928 | (AF061795) dynamin-like protein Dymple | gi\|3126874 | 2 | 778 | 77 | 77 | HSYBO86 |
| | | isoform [Homo sapiens] | | | | | | |
| | | >sp\|O60709\|O60709 DYNAMIN-LIKE | | | | | | |
| | | PROTEIN DYMPLE ISOFORM. Length = | | | | | | |
| | | 699 | | | | | | |
| 170 | 831949 | | | 3 | 1109 | | | HE8TX12 |
| 171 | 831950 | | | 48 | 521 | | | HAPQS51 |
| 172 | 831953 | carbonic anhydrase II [Homo sapiens] | gi\|179772 | 106 | 987 | 100 | 100 | HWLHA60 |
| | | >gi\|179780 carbonic anhydrase II [Homo | | | | | | |
| | | sapiens] >gi\|179795 carbonic anhydrase II | | | | | | |
| | | [Homo sapiens] >gi\|29587 carbonic | | | | | | |
| | | anhydrase II (AA 1-260) [Homo sapiens] | | | | | | |
| 173 | 831975 | | | 555 | 761 | | | HDTB006 |
| 174 | 832036 | human phosphotyrosine phosphatase kappa | gnl\|P1D\|e234080 | 2 | 490 | 82 | 82 | HCYAC13 |
| | | [Homo sapiens] Length = 1439 | | | | | | |
| 175 | 832047 | | | 877 | 1137 | | | HCWKS85 |
| 176 | 832078 | | | 751 | 1014 | | | HA5AB14 |
| 177 | 832100 | | | 687 | 917 | | | HCRNM09 |
| 178 | 832104 | | | 95 | 220 | | | HCRMU71 |
| 179 | 832268 | | | 18 | 191 | | | HTXOU56 |
| 180 | 832270 | Ca2+ ATPase of fast-twitch skeletal muscle | gi\|2052522 | 622 | 1290 | 90 | 91 | HBKDW03 |
| | | sacroplasmic reticulum, adult isoform | | | | | | |
| | | [Homo sapiens] >sp\|O14983\|O14983 CA2+ | | | | | | |
| | | ATPASE OF FAST-TWITCH SKELETAL | | | | | | |
| | | MUSCLE SACROPLASMIC | | | | | | |
| | | RETICULUM, ADULT ISOFORM. | | | | | | |
| | | Length = 1001 | | | | | | |
| 181 | 832279 | acetyl-CoA synthetase [Drosophila | gi\|608694 | 2 | 1237 | 65 | 77 | HBKDN33 |
| | | melanogaster] >pir\|S52154\|852154 acetyl- | | | | | | |
| | | CoA synthetase - fruit fly (Drosophila | | | | | | |
| | | melanogaster) >sp\|Q24226\|Q24226 | | | | | | |
| | | ACETYL-COENZYME A SYNTHETASE | | | | | | |
| | | (EC 6.2.1.1) (ACETATE--COA LIGASE) | | | | | | |
| | | (ACYL-ACTIVATING ENZYME). | | | | | | |
| | | Length = 581 | | | | | | |
| 182 | 832317 | 11kD protein [Homo sapiens] Length = 111 | gi\|897917 | 270 | 719 | 100 | 100 | HBIAX17 |
| 183 | 832354 | | | 1 | 408 | | | HBBBE52 |
| 184 | 832364 | | | 3 | 1385 | | | HDPQA93 |
| 185 | 832378 | sialidase [Homo sapiens] >gi\|2773339 | gn\|PID\|e303801 | 3 | 746 | 96 | 96 | HATC072 |
| | | (AF040958) lysosomal neuraminidase | | | | | | |
| | | precursor [Homo sapiens] >gi\|4099141 | | | | | | |
| | | lysosomal sialidase [Homo sapiens] | | | | | | |
| | | >sp\|Q99519\|Q99519 SIALIDASE | | | | | | |
| | | PRECURSOR. >sp\|G4099141\|G4099141 | | | | | | |
| | | LYSOSOMAL SIALIDASE PRECURSOR | | | | | | |
| | | (EC 3.2.1.18). Lengt | | | | | | |
| 186 | 832385 | (AF048700) gastrointestinal peptide [Homo | gi\|2935440 | 2 | 316 | 90 | 90 | HARAG42 |
| | | sapiens] >sp\|O60575\|O60575 | | | | | | |
| | | GASTROINTESTINAL PEPTIDE. Length = | | | | | | |
| | | 86 | | | | | | |
| 187 | 832428 | APO-1 ANTIGEN, FAS ANTIGEN. | sp\|G249613\|G2496 | 136 | 846 | 97 | 97 | HAMGD53 |
| | | Length = 335 | 13 | | | | | |
| 188 | 832485 | | | 202 | 597 | | | HAGHC54 |
| 189 | 832494 | Ku protein subunit [Homo sapiens] | gi\|307095 | 80 | 1918 | 90 | 90 | HAIBY70 |
| | | >gi\|178650 p70 autoantigen [Homo sapiens] | | | | | | |
| | | >gi\|339667 thyroid autoantigen [Homo | | | | | | |
| | | sapiens] >bbs\|107206 Ku autoantigen p70 | | | | | | |
| | | subunit [human, Peptide, 609 aa] [Homo | | | | | | |
| | | sapiens] >pir\|A30299\|A30894 70K thyroid | | | | | | |
| | | autoantigen - human >sp | | | | | | |
| 190 | 832512 | Similar to Human C219-reactive peptide | gnl\|PID\|d1014138 | 3 | 1058 | 87 | 87 | HDPTT16 |
| | | (L34688) [Homo sapiens] | | | | | | |
| | | >sp\|Q92580\|Q92580 MYELOBLAST | | | | | | |
| | | K1A0268 (FRAGMENT). >gi\|511639 C219- | | | | | | |
| | | reactive peptide [Homo sapiens] {SUB 592- | | | | | | |
| | | 727} Length = 1193 | | | | | | |
| 191 | 832515 | integrin alpha6 subunit [Homo sapiens] | gi\|33942 | 2 | 1660 | 96 | 96 | HCRPH70 |
| | | Length = 1067 | | | | | | |
| 192 | 832526 | nuclear factor RIP140 [Homo sapiens] | gi\|940539 | 34 | 693 | 95 | 95 | HADCX04 |
| | | >pir\|557348\|557348 nuclear factor RIP140 - | | | | | | |
| | | human Length = 1158 | | | | | | |
| 193 | 832575 | protein tyrosine kinase [Homo sapiens] | gi\|451482 | 49 | 1203 | 99 | 99 | H2LAJ21 |
| | | >pir\|A55922\|A55922 tyrosine kinase A6 - | | | | | | |
| | | human >sp\|Q12792\|Q12792 PROTEIN | | | | | | |
| | | TYROSINE KINASE. Length = 350 | | | | | | |
| 194 | 832576 | BTG1 gene product [Homo sapiens] | gi\|29509 | 388 | 1050 | 100 | 100 | HKGAJ67 |
| | | >gi\|293306 BTG1 [Mus musculus] | | | | | | |
| | | >gi\|50188 btg1 [Mus musculus] | | | | | | |
| | | >pir\|S20947\|S20947 BTG1 protein - human | | | | | | |
| | | >pir\|I48272\|I48272 btg1 protein - mouse | | | | | | |
| | | >sp\|P31607\|BTG1_HUMAN BTG1 | | | | | | |
| | | PROTEIN (B-CELL TRANSLOCATION | | | | | | |
| | | GENE 1 PROTEIN). Length | | | | | | |
| 195 | 832588 | mitochondrial ATP synthase subunit 9 | gi\|511450 | 2 | 637 | 85 | 85 | H2LAD51 |
| | | precursor [Homo sapiens] | | | | | | |
| | | >pir\|I38612\|I38612 ATP synthase chain 9 | | | | | | |
| | | precursor, mitochondrial - human | | | | | | |
| | | >sp\|P48201\|AT93_HUMAN ATP | | | | | | |
| | | SYNTHASE LIPID-BINDING PROTEIN | | | | | | |
| | | P3 PRECURSOR (EC 3.6.1.34) (ATPASE | | | | | | |
| | | PROTEIN 9) (SUBUNIT C). Leng | | | | | | |
| 196 | 832634 | | | 253 | 924 | | | HCRMZ25 |
| 197 | 832728 | | | 3 | 542 | | | HKAIL83 |
| 198 | 833094 | immunoglobulin from VH4 family [Homo | gi\|37725 | 2 | 391 | 77 | 81 | HRADC46 |
| | | sapiens] >pir\|S13519\|S13519 Ig heavy chain | | | | | | |
| | | V region precursor - human >gi\|553385 | | | | | | |
| | | immunoglobulin heavy chain [Homo | | | | | | |
| | | sapiens] {SUB 24-125} Length = 147 | | | | | | |
| 199 | 833395 | | | 224 | 853 | | | HHENV68 |
| 200 | 834326 | novel stromal cell protein [Mus musculus] | gnl\|PID\|e229590 | 1 | 744 | 69 | 76 | HWLEQ41 |
| | | >pir\|JC4761\|JC4761 recombination | | | | | | |
| | | activating gene 1 inducing protein - human | | | | | | |
| | | >sp\|Q62275\|Q62275 RECOMBINATION | | | | | | |
| | | ACTIVATING PROTEIN 1 PROTEIN | | | | | | |
| | | ACTIVATION (NOVEL STROMAL CELL | | | | | | |
| | | PROTEIN). Length = 221 | | | | | | |
| 201 | 834583 | (AE073957) CXC chemokine BRAK [Homo | gi\|4140394 | 2 | 607 | 98 | 100 | HHGDE66 |
| | | sapiens] Length = 99 | | | | | | |
| 202 | 834944 | (AFO6 1443) G protein-coupled receptor | gi\|3885470 | 2 | 781 | 85 | 86 | HE8QE56 |
| | | LGR4 [Rattus norvegicus] | | | | | | |
| | | >sp\|G3885470\|G3885470 G PROTEIN- | | | | | | |
| | | COUPLED RECEPTOR LGR4. Length = | | | | | | |
| | | 951 | | | | | | |
| 203 | 835012 | | | 3 | 344 | | | HCCMD55 |
| 204 | 835104 | (AB017169) Slit-3 protein [Homo sapiens] | gnl\|PID\|d1036172 | 580 | 1818 | 92 | 92 | HLHTJ57 |
| | | >sp\|D1036172\|D1036172 SLIT-3 | | | | | | |
| | | PROTEIN. >gnl\|P1D\|d1033429 (AB011538) | | | | | | |
| | | MEGF5 [Homo sapiens] {SUB 785-1523} | | | | | | |
| | | Length = 1523 | | | | | | |
| 205 | 835332 | (AE065389) tetraspan NET-4 [Homo | gi\|3152703 | 268 | 1080 | 100 | 100 | HCROP84 |
| | | sapiens] >sp\|O60746\|O60746 TETRASPAN | | | | | | |
| | | NET-4. Length = 268 | | | | | | |
| 206 | 835487 | (AC002528) alpha2(I) collagen [Homo | gi\|2388555 | 2218 | 4239 | 100 | 100 | HTSGZ29 |
| | | sapiens] >sp\|G2388555\|G2388555 | | | | | | |
| | | ALPHA2(I) COLLAGEN (FRAGMENT). | | | | | | |
| | | Length = 1186 | | | | | | |
| 207 | 836182 | | | 39 | 398 | | | HFLUE31 |
| 208 | 836522 | | | 1819 | 2046 | | | HSLFO17 |
| 209 | 836655 | | | 1 | 624 | | | HTPCU04 |
| 210 | 836787 | calmodulin-dependent protein kinase II-delta | gi\|203267 | 767 | 1549 | 92 | 94 | HAIED73 |
| | | (EC 2.7.1.37) [Rattus norvegicus] | | | | | | |
| | | >pir\|A34366\|A34366 Ca2+/calmodulin- | | | | | | |
| | | dependent protein kinase (EC 2.7.1.123) II | | | | | | |
| | | delta chain - rat >sp\|P15791\|KCCD_RAT | | | | | | |
| | | CALCIUM/CALMODULIN-DEPENDENT | | | | | | |
| | | PROTEIN KJNASE TYPE II DELTA CH | | | | | | |
| 211 | 836789 | GP36b glycoprotein [Homo sapiens] | gi\|505652 | 1 | 849 | 99 | 99 | HKAAD74 |
| | | >pir\|G01447\|G01447 GP36b glycoprotein - | | | | | | |
| | | human >sp\|Q12907\|Q12907 GP36B | | | | | | |
| | | GLYCOPROTEIN PRECURSOR. Length = | | | | | | |
| | | 356 | | | | | | |
| 212 | 838577 | binding protein [Oryctolagus cuniculus] | gi\|165023 | 2 | 433 | 100 | 100 | HCRQD09 |
| | | >gi\|182628 FK506-binding protein (FKBP) | | | | | | |
| | | [Homo sapiens] >gi\|182633 FKBP-12 | | | | | | |
| | | protein [Homo sapiens] >gi\|182649 FK506- | | | | | | |
| | | binding protein 12 [Homo sapiens] | | | | | | |
| | | >gi\|288196 FKBP [Homo sapiens] | | | | | | |
| | | >gi\|665650 FK-506 binding protein [H | | | | | | |
| 213 | 838717 | | | 676 | 900 | | | HE8UJ03 |
| 214 | 839008 | | | 2 | 997 | | | HFOXS52 |
| 215 | 840063 | (AF006751) ES/130 [Homo sapiens] | gi\|3299885 | 3 | 2729 | 84 | 85 | HWLHX68 |
| | | >sp\|O75300\|O75300 ES/130. Length = 977 | | | | | | |
| 216 | 840533 | | | 183 | 482 | | | HWLLU74 |
| 217 | 840669 | | | 474 | 1115 | | | HPMGM71 |
| 218 | 841140 | (AF081281) lysophospholipase [Homo | gi\|3415123 | 1 | 789 | 100 | 100 | HAJCC51 |
| | | sapiens] >sp\|O75608\|O756O8 | | | | | | |
| | | LYSOPHOSPHOLIPASE. Length = 230 | | | | | | |
| 219 | 841386 | polypeptide Ga1NAc transferase-T4 [Mus | gi\|2121220 | 491 | 1258 | 66 | 81 | HMCCA66 |
| | | musculus] >sp\|O08832\|O08832 | | | | | | |
| | | POLYPEPTIDE GALNAC | | | | | | |
| | | TRANSFERASE-T4. Length = 578 | | | | | | |
| 220 | 841480 | | | 3 | 212 | | | HDQET68 |
| 221 | 841509 | | | 3 | 662 | | | HTELO87 |
| 222 | 841616 | | | 340 | 660 | | | HWLFT95 |
| 223 | 841900 | peptidylarginine deiminase (EC 3.5.3.15) | gi\|205960 | 2 | 439 | 87 | 90 | HWLFR87 |
| | | [Rattus norvegicus] >pir\|A34339\|DIRTR1 | | | | | | |
| | | protein-arginine deiminase (BC 3.5.3.15) 1 - | | | | | | |
| | | rat >sp\|P20717\|PARD_RAT PROTEIN- | | | | | | |
| | | ARGININE DEIMINASE (EC 3.5.3.15) | | | | | | |
| | | (PEPTIDYLARGININE DEIMINASE). | | | | | | |
| | | Length = 665 | | | | | | |
| 224 | 842054 | ubiquinone-binding protein (QP) [Homo | gi\|190802 | 1 | 369 | 100 | 100 | HWHPF06 |
| | | sapiens] >gi\|190816 ubiquinone-binding | | | | | | |
| | | protein precursor [Homo sapiens] .gi\|37580 | | | | | | |
| | | ubiquinone-binding protein (AA 1-111) | | | | | | |
| | | [Homo sapiens] >pir\|A32450\|A32450 | | | | | | |
| | | ubiquinone-binding protein QP-C - human | | | | | | |
| | | >gi\|553631 ubiquinone | | | | | | |
| 225 | 843061 | (AB012933) acyl-CoA synthetase 5 [Rattus | gnl\|PID\|d1034547 | 23 | 2308 | 81 | 92 | HDAAV92 |
| | | norvegicus]>sp\|O88813\|LCFE_RAT | | | | | | |
| | | LQNG-CHAIN-FATTY-ACJD--COA | | | | | | |
| | | LIGASE 5 (EC 6.2.1.3) (LONG-CHAIN | | | | | | |
| | | ACYL-COA SYNTHETASE 5) (LACS 5). | | | | | | |
| | | Length = 683 | | | | | | |
| 226 | 843544 | | | 2 | 391 | | | HFLNB80 |
| 227 | 844092 | (AF045573) FLI-LRR associated protein-1 | gi\|3025718 | 28 | 837 | 65 | 83 | HTEKO43 |
| | | [Mus musculus] >sp\|O70323\|O70323 | | | | | | |
| | | FLIGHTLESS-I ASSOCIATED PROTEIN | | | | | | |
| | | 1 (LRR DOMAIN) (FLI-LRR | | | | | | |
| | | ASSOCIATED PROTEIN-1). Length = 628 | | | | | | |
| 228 | 844270 | nuclear antigen EBNA-3B [Human | gi\|330409 | 2 | 373 | 47 | 52 | HWLBL06 |
| | | herpesvirus 4] >pir\|527921\|527921 nuclear | | | | | | |
| | | antigen EBNA-3B - human herpesvirus 4 | | | | | | |
| | | >sp\|Q69139\|Q69139 NUCLEAR ANTIGEN | | | | | | |
| | | EBNA-3B. Length = 946 | | | | | | |
| 229 | 844604 | (AF071186) WW domain binding protein 11 | gi\|3550082 | 170 | 2110 | 66 | 70 | HNTAD40 |
| | | [Mus musculus] >sp\|O88539\|O88539 WW | | | | | | |
| | | DOMAIN BINDING PROTEIN 11. | | | | | | |
| | | Length = 389 | | | | | | |
| 230 | 844685 | immunoglobulin lambda heavy chain [Homo | gnl\|PID\|e1227585 | 539 | 1564 | 94 | 94 | HASAC08 |
| | | sapiens] >gi\|567132 This CDS feature is | | | | | | |
| | | included to show the translation of the | | | | | | |
| | | corresponding C_region. Presently | | | | | | |
| | | translation qualifiers on C_region features | | | | | | |
| | | are illegal [Homo sapiens] {SUB 148-177} | | | | | | |
| | | Length = 477 | | | | | | |
| 231 | 844855 | titin [Oryctolagus cuniculus] | gnl\|PID\|e1355301 | 3 | 1634 | 34 | 54 | HAICQ70 |
| | | >sp\|E1355301\|E1355301 TITIN | | | | | | |
| | | (FRAGMENT). Length = 2000 | | | | | | |
| 232 | 845101 | (AF089814) growth suppressor related | gi\|3661529 | 46 | 627 | 94 | 94 | HHESZ77 |
| | | [Homo sapiens] >sp\|O75956\|O75956 | | | | | | |
| | | GROWTH SUPPRESSOR RELATED. | | | | | | |
| | | Length = 126 | | | | | | |
| 233 | 845141 | | | 31 | 966 | | | HWMFO67 |
| 234 | 845220 | (AB011105) K1AA0533 protein [Homo | gnl\|P1D\|d1026389 | 2 | 1096 | 100 | 100 | HKADF64 |
| | | sapiens] >sp\|O15230\|O15230 KIAA0533 | | | | | | |
| | | PROTEIN (LAMININ ALPHA 5 CHAIN) | | | | | | |
| | | (FRAGMENT). >gnl\|PTD\|e317479 laminin | | | | | | |
| | | alpha 5 chain [Homo sapiens] {SUB 693- | | | | | | |
| | | 1645} Length = 1645 | | | | | | |
| 235 | 845434 | glutathione peroxidase [Synechocystis sp.] | gnl\|PID\|d1019077 | 3 | 590 | 50 | 61 | HWAFI12 |
| | | >pir\|S75885\|S75885 glutathione peroxidase | | | | | | |
| | | homolog - Synechocystis sp. (PCC 6803) | | | | | | |
| | | >sp\|P74250\|P74250 GLUTATHIONE | | | | | | |
| | | PEROXIDASE (EC 1.11.1.9). Length = 169 | | | | | | |
| 236 | 845510 | dipeptidyl peptidase III [Rattus norvegicus] | gnl\|PID\|d1025528 | 3 | 683 | 96 | 98 | HEONN92 |
| | | >sp\|O55096\|O55096 DIPEPTIDYL | | | | | | |
| | | PEPTIDASE (EC 3.4.14.4) (DIPEPTIDYL | | | | | | |
| | | PEPTIDASE III) (DIPEPTIDYL | | | | | | |
| | | AMINOPEPTIDASE III) (DIPEPTIDYL | | | | | | |
| | | ARYLAMIDASE III) (RED CELL | | | | | | |
| | | ANGIOTENSINASE) (ENKEPHALINASE | | | | | | |
| | | B). Length = 827 | | | | | | |
| 237 | 845600 | preprocathepsin B [Homo sapiens] | gi\|181192 | 223 | 1254 | 99 | 99 | HOEME38 |
| | | >pir\|A26498\|KHHUB cathepsin B (EC | | | | | | |
| | | 3.4.22.1) precursor - human | | | | | | |
| | | >sp\|P07858\|CATB_HUMAN CATHEPSIN | | | | | | |
| | | B PRECURSOR (EC 3.4.22.1) | | | | | | |
| | | (CATHIEPSIN B1) (APP SECRETASE). | | | | | | |
| | | >gi\|181178 lysosomal proteinase cathepsin | | | | | | |
| | | B [Homo sapiens] {SUB 131-33 | | | | | | |
| 238 | 845882 | (AF055666) kinesin light chain 2 [Mus | gi\|3347848 | 4 | 1155 | 68 | 75 | HLHCE82 |
| | | musculus] >sp\|O88448\|O88448 KINESIN | | | | | | |
| | | LIGHT CHAIN 2. Length = 599 | | | | | | |
| 239 | 846007 | alpha-1-acid glycoprotein 2 [Homo sapiens] | gi\|77840 | 1 | 390 | 98 | 100 | HLDBS16 |
| | | >pir\|JT0326\|OMHU2 alpha-1-acid | | | | | | |
| | | glycoprotein 2 precursor - human | | | | | | |
| | | >sp\|P19652\|IAH_HUMAN ALPHA-1- | | | | | | |
| | | ACID GLYCOPROTEIN 2 PRECURSOR | | | | | | |
| | | (AGP 2) (OROSOMUCOID 2) (OMD 2). | | | | | | |
| | | >gi\|388511 alpha 1-acid glycoprotein | | | | | | |
| | | [Homo sapiens] {SU | | | | | | |
| 240 | 846280 | | | 31 | 105 | | | HCNAK57 |
| 241 | 846286 | epididymal apical protein I-precursor | gi\|38063 | 203 | 901 | 36 | 54 | HASDA19 |
| | | [Macaca fascicularis] >pir\|S28258\|S28258 | | | | | | |
| | | androgen-regulated epididymal protein | | | | | | |
| | | precursor - crab-eating macaque | | | | | | |
| | | >sp\|Q28475\|Q28475 EPIDIDYMAL | | | | | | |
| | | APICAL PROTEIN I-PRECURSOR. | | | | | | |
| | | Length = 776 | | | | | | |
| 242 | 846388 | | | 3 | 1721 | | | HL3AA32 |
| 243 | HCRNG17R | | | 154 | 288 | | | HCRNG17 |
| 244 | HWMFG64R | | | 1 | 315 | | | HWMFG64 |
| 245 | HAGCZ94R | | | 13 | 102 | | | HAGCZ94 |
| 246 | HBJEJ74R | | | 72 | 287 | | | HBJEJ74 |
| 247 | HUFBE67R | | | 355 | 525 | | | HUFBE67 |
| 248 | HUTHM43R | | | 2 | 55 | | | HUTHM43 |
| 249 | HLTGU75R | | | 2 | 274 | | | HLTGU75 |
| 250 | HWLKF77R | | | 51 | 134 | | | HWLKF77 |
| 251 | HWLLK67R | | | 1 | 180 | | | HWLLK67 |
| 252 | HDQIE85R | | | 3 | 203 | | | HDQIE85 |
| 253 | HWLFA67R | | | 1 | 213 | | | HWLFA67 |
| 254 | HWLGX29R | | | 136 | 351 | | | HWLGX29 |
| 255 | HWMFZ29R | | | 324 | 404 | | | HWMFZ29 |
| 256 | HNTRR03R | | | 1 | 363 | | | HNTRR03 |
| 257 | H6EEP19R | | | 2 | 103 | | | H6EEP19 |
| 258 | HJMAM83R | | | 2 | 352 | | | HJMAM83 |
| 259 | HAGHF58R | (AB018797) calmodulin B [Halocynthia | gnl\|PID\|d1034943 | 1 | 138 | 88 | 88 | HAGHF58 |
| | | roretzi] >sp\|D1034943\|D1034943 | | | | | | |
| | | CALMODULIN B. Length = 149 | | | | | | |
| 260 | HDPHG48R | (AC005031) neuronal apoptosis inhibitory | gi\|3688110 | 1 | 354 | 98 | 99 | HDPHG48 |
| | | protein [Homo sapiens] >sp\|O75857\|O75857 | | | | | | |
| | | NEURONAL APOPTOSIS INHIBITORY | | | | | | |
| | | PROTEIN (FRAGMENT). Length = 1178 | | | | | | |
| 261 | HWLUL19R | (AC005154) similar to protein U28928 | gi\|3242764 | 2 | 211 | 59 | 62 | HWLUL19 |
| | | (PID:g861306) [Homo sapiens] | | | | | | |
| | | >sp\|O75223\|O75223 | | | | | | |
| | | WUGSC:H_DJ0777023.1 PROTEIN. | | | | | | |
| | | Length = 188 | | | | | | |
| 262 | HWLLI56R | (AD000684) liver-specific bHLH-Zip | gi\|1905918 | 1 | 489 | 61 | 65 | HWLLI56 |
| | | transcription factor [Homo sapiens] | | | | | | |
| | | >sp\|O00112\|O00112 LIVER-SPECIFIC | | | | | | |
| | | BHLH-ZIP TRANSCRIPTION FACTOR | | | | | | |
| | | (FRAGMENT). Length = 429 | | | | | | |
| 263 | HWMAA87R | (AF001904) 3-hydroxyacyl-CoA | gi\|2108130 | 3 | 92 | 86 | 86 | HWMAA87 |
| | | dehydrogenase isoform 2 [Homo sapiens] | | | | | | |
| | | >sp\|OO0397\|O00397 3-HYDROXYACYL- | | | | | | |
| | | COA DEHYDROGENASE ISOFORM 2 | | | | | | |
| | | (FRAGMENT). Length = 76 | | | | | | |
| 264 | HGLAT96R | (AF007861) ce-Mago [Caenorhabditis | gi\|2306971 | 165 | 359 | 91 | 91 | HGLAT96 |
| | | elegans] >sp\|O16104\|O16104 CE-MAGO | | | | | | |
| | | (FRAGMENT). Length = 147 | | | | | | |
| 265 | HCDMC32R | (AF014118) membrane-associated kinase | gi\|2460023 | 3 | 272 | 100 | 100 | HCDMC32 |
| | | [Homo sapiens] >sp\|O14731\|O14731 | | | | | | |
| | | MEMBRANE-ASSOCIATED KINASE. | | | | | | |
| | | Length = 499 | | | | | | |
| 266 | HCROF25R | (AF034800) liprin-alpha3 [Homo sapiens] | gi\|3309535 | 70 | 381 | 60 | 65 | HCROF25 |
| | | >sp\|G3309535\|G3309535 LIPRIN-ALPHA3 | | | | | | |
| | | (FRAGMENT). Length = 443 | | | | | | |
| 267 | HTEQO80R | (AF035840) NADH:ubiquinone | gi\|3800740 | 1 | 327 | 100 | 100 | HTEQ080 |
| | | oxidoreductase B17 subunit [Homo sapiens] | | | | | | |
| | | >sp\|G3800740\|G3800740 | | | | | | |
| | | NADH:UBIQUINONE | | | | | | |
| | | OXIDOREDUCTASE B17 SUBUNIT. | | | | | | |
| | | Length = 128 | | | | | | |
| 268 | H2LAU18R | (AF035940) similar to mago nashi [Homo | gi\|2909830 | 2 | 592 | 100 | 100 | H2LAU18 |
| | | sapiens] >gi\|2330011 (AF007862) mm- | | | | | | |
| | | Mago [Mus musculus] >gi\|2909828 | | | | | | |
| | | (AF035939) similar to mago nashi [Mus | | | | | | |
| | | musculus] >sp\|035169\|O35169 MM- | | | | | | |
| | | MAGO. >sp\|G2909830\|G2909830 | | | | | | |
| | | MAGOH. >sp\|P50606\|MGN_HUMAN | | | | | | |
| | | MAGO NASHI PROTEIN HOMOL | | | | | | |
| 269 | HTXPO87R | (AF038129) polyubiquitin [Ovis aries] | gi\|2707837 | 1 | 330 | 97 | 97 | HTXPO87 |
| | | >sp\|O46543\|O46543 POLYUBIQUITIN. | | | | | | |
| | | >gnl\|PID\|e1263307 unnamed protein | | | | | | |
| | | product [unidentified] {SUB 77-305} | | | | | | |
| | | >gi\|163575 polyubiquitin [Bos taurus] {SUB | | | | | | |
| | | 142-305} >gi\|1762374 polyubiquitin [Gallus | | | | | | |
| | | gallus] {SUB 1-71} >gnl\|PID\| | | | | | | |
| 270 | H2LARO8R | (AF040642) contains similarity to RNA | gi\|2746787 | 188 | 514 | 75 | 90 | H2LAR08 |
| | | recognition motifs (RNP) [Caenorhabditis | | | | | | |
| | | elegans] >sp\|O44795\|O44795 C50D2.5 | | | | | | |
| | | PROTEIN. Length = 200 | | | | | | |
| 271 | HADAE94R | (AF044957) NADH:ubiquinone | gi\|4164446 | 88 | 135 | 88 | 88 | HADAF94 |
| | | oxidoreductase B15 subunit [Homo sapiens] | | | | | | |
| | | Length = 129 | | | | | | |
| 272 | HEMDA91R | (AF047473) testis mitotic checkpoint BUB3 | gi\|3378104 | 132 | 431 | 85 | 85 | HEMDA91 |
| | | [Homo sapiens] >sp\|O43685\|O43685 | | | | | | |
| | | TESTIS MITOTIC CHECKPOINT BUB3. | | | | | | |
| | | Length = 326 | | | | | | |
| 273 | HWMFNS8R | (AF051426) slow delayed rectifier channel | gi\|2961249 | 3 | 344 | 100 | 100 | HWMFN58 |
| | | subunit [Homo sapiens] | | | | | | |
| | | >sp\|O60607\|O60607 SLOW DELAYED | | | | | | |
| | | RECTIFIER CHANNEL SUBUNIT. | | | | | | |
| | | Length = 548 | | | | | | |
| 274 | HCNDJ66R | (AF054643) lambda 1 immunoglobulin light | gi\|3023109 | 1 | 276 | 72 | 73 | HCNDJ66 |
| | | chain variable region [Homo sapiens] | | | | | | |
| | | >gi‘3023109 (AF054643) lambda 1 | | | | | | |
| | | immunoglobulin light chain variable region | | | | | | |
| | | [Homo sapiens] Length = 125 | | | | | | |
| 275 | HOHDH05R | (AF061833) aldehyde dehydrogenase; | gi\|3818533 | 59 | 331 | 53 | 80 | HOHDH05 |
| | | retinal dehydrogenase; class I aldehyde | | | | | | |
| | | dehydrogenase; ALDH1 [Xenopus laevis] | | | | | | |
| | | >sp\|G3818533\|G3818533 ALDEHYDE | | | | | | |
| | | DEHYDROGENASE (EC 1.2.1.3). | | | | | | |
| | | >pir\|S51188‘S51188 aldehyde | | | | | | |
| | | dehydrogenase (NAD+) (EC 1.2.1.3), | | | | | | |
| | | cytosolic - clawed f | | | | | | |
| 276 | HUFBP63R | (AF062137) immunoglobulin heavy chain | gi\|3170737 | 17 | 463 | 92 | 96 | HUFBP63 |
| | | variable region [Homo sapiens] Length = | | | | | | |
| | | 143 | | | | | | |
| 277 | HUFBN90R | (AF062211) immunoglobulin heavy chain | gi\|3170885 | 26 | 463 | 94 | 96 | HUFBN90 |
| | | variable region [Homo sapiens] Length = | | | | | | |
| | | 149 | | | | | | |
| 278 | HEBEJ57R | (AF062214) immunoglobulin heavy chain | gi\|3170895 | 1 | 165 | 81 | 90 | HEBEJS7 |
| | | variable region [Homo sapiens] Length = | | | | | | |
| | | 142 | | | | | | |
| 279 | HDTDK65R | (AF069048) immunoglobulin light chain | gi\|3328006 | 3 | 434 | 76 | 78 | HDTDK65 |
| | | variable region [Homo sapiens] Length = | | | | | | |
| | | 120 | | | | | | |
| 280 | HAIAD82R | (AF069711) urokinase [Oryctolagus | gi\|3982741 | 1 | 156 | 68 | 71 | HAIAD82 |
| | | cuniculus] >sp\|G3982741\|G3982741 | | | | | | |
| | | UROKINASE (FRAGMENT). Length = | | | | | | |
| | | 128 | | | | | | |
| 281 | HFKHD61R | (AF073298) 4F5rel [Homo sapiens] | gi\|3641538 | 3 | 203 | 100 | 100 | HFKHD61 |
| | | >gi\|3641536 (AF073297) 4FSrel [Mus | | | | | | |
| | | musculus] >sp\|O75918\|O75918 4F5REL. | | | | | | |
| | | >sp\|O88891\|O88891 4F5REL. Length = 59 | | | | | | |
| 282 | H2LAX28R | (AE078817) high mobility group protein | gi\|3342571 | 206 | 568 | 97 | 97 | H2LAX28 |
| | | [Nannospalax ehrenbergi] | | | | | | |
| | | >sp\|O88611\|O88611 HIGH MOBILITY | | | | | | |
| | | GROUP PROTEIN. Length = 215 | | | | | | |
| 283 | HWLMY93R | (AF078839) Rho related protein Rnd3/Rho8 | gi\|3386532 | 3 | 173 | 91 | 91 | HWLMY93 |
| | | [Sus scrofa] >sp\|O77683\|O77683 RHO | | | | | | |
| | | RELATED PROTEIN RND3/RHO8. | | | | | | |
| | | Length = 244 | | | | | | |
| 284 | HTXNL13R | | | 3 | 356 | | | HTXNL13 |
| 285 | HDPWR89R | (AJ005259) homologous to Bombyx mori | gnl\|PID\|e1286414 | 1 | 312 | 79 | 83 | HDPWR89 |
| | | multiprotein bridging factor (EMBL: | | | | | | |
| | | AB001078) [Homo sapiens] | | | | | | |
| | | >sp\|O6O869\|O6O869 EDF-1 PROTEIN. | | | | | | |
| | | Length = 148 | | | | | | |
| 286 | H2LAK62R | | | 22 | 165 | | | H2LAK62 |
| 287 | HWLKT15R | (AJ235272) | gnl\|PID\|e1342961 | 2 | 301 | 50 | 76 | HWLKT15 |
| | | UBIQUINONE/MENAQUINONE | | | | | | |
| | | BIOSYNTHESIS | | | | | | |
| | | METHLYTRANSFERASE UBIE (ubiE) | | | | | | |
| | | [Rickettsia prowazekii] | | | | | | |
| 288 | HATAR77R | (AL021546) Cytochrome C Oxidase | gnl\|PID\|e1248288 | 3 | 413 | 70 | 73 | HATAR77 |
| | | Polypeptide VIa-liver precursor (EC 1.9.3.1) | | | | | | |
| | | [Homo sapiens] | | | | | | |
| 289 | HWLWN07R | (AL022237) bK1191B2.2 (BCL2- | gnl\|PID\|e1359316 | 1 | 183 | 82 | 88 | HWLWN07 |
| | | interacting killer (apoptosis-inducing) | | | | | | |
| | | (NBK, BP4, BIP1)) [Homo sapiens] | | | | | | |
| | | >sp\|E1359316\|E1359316 BK1191B2.2 | | | | | | |
| | | (BCL2-INTERACTING KILLER | | | | | | |
| | | (APOPTOSIS-INDUCING) (NBK, BP4, | | | | | | |
| | | BIP1)) (FRAGMENT). >gi\|929655 NBK | | | | | | |
| | | [Homo sapiens] {SUB 14-173} Le | | | | | | |
| 290 | HWLDI18R | (AL023554) ribosomal protein | gnl\|PID\|e1292696 | 3 | 206 | 43 | 59 | HWLDI18 |
| | | [Schizosaccharomyces pombe] | | | | | | |
| | | >sp\|O60118\|O60118 RIBOSOMAL | | | | | | |
| | | PROTEIN. Length = 157 | | | | | | |
| 291 | HWMEC68R | | | 3 | 419 | | | HWMEC68 |
| 292 | HTXFO53R | 11 beta-hydroxysteroid dehydrogenase type | gi\|565082 | 3 | 236 | 88 | 94 | HTXFO53 |
| | | II [Homo sapiens] >pir\|I38858\|I38858 | | | | | | |
| | | 11beta-hydroxysteroid dehydrogenase (EC | | | | | | |
| | | 1.1.1.146) type 2- human | | | | | | |
| | | >sp\|P80365\|DHI2_HUMAN | | | | | | |
| | | CORTICOSTEROID 11-BETA- | | | | | | |
| | | DEHYDROGENASE, ISOZYME 2 (EC | | | | | | |
| | | 1.1.1.146) (11-DH2) (11-BETA-HYDROX | | | | | | |
| 293 | HWMEH18R | 3′,5′-cyclic-GMP phosphodiesterase (EC | pir\|B34611\|B3461 | 3 | 203 | 92 | 92 | HWMEH18 |
| | | 3.1.4.35) alpha chain - human >gi\|3513491 | 1 | | | | | |
| | | (AF022380) rod photoreceptor cGMP | | | | | | |
| | | phosphodiesterase alpha subunit [Homo | | | | | | |
| | | sapiens] {SUB 1-122} Length = 859 | | | | | | |
| 294 | HCWFF03R | 5′ half of the product is homologues to | gi\|28384 | 3 | 296 | 83 | 90 | HCWFF03 |
| | | Bacillus subtiis SAICAR synthetase, 3′ half | | | | | | |
| | | corresponds to the catalytic subunit of AIR | | | | | | |
| | | carboxylase [Homo sapiens] | | | | | | |
| | | >pir\|S14147\|S14147 multifunctional purine | | | | | | |
| | | biosynthesis protein - human Length = 425 | | | | | | |
| 295 | HCNDP66R | A33 antigen precursor [Homo sapiens] | gi\|1814277 | 3 | 503 | 73 | 75 | HCNDP66 |
| | | >sp\|Q99795\|A33_HUMAN CELL | | | | | | |
| | | SURFACE A33 ANTIGEN PRECURSOR. | | | | | | |
| | | Length = 319 | | | | | | |
| 296 | HCRMK82R | adenosine A2b receptor [Homo sapiens] | gi\|178150 | 2 | 427 | 100 | 100 | HCRMK82 |
| | | >gi\|757911 A2b adenosine receptor [Homo | | | | | | |
| | | sapiens] >pir\|JC1229\|JC1229 adenosine | | | | | | |
| | | receptor A2b - human | | | | | | |
| | | >sp\|P29275\|AA2B_HUMAN ADENOSINE | | | | | | |
| | | A2B RECEPTOR. Length = 332 | | | | | | |
| 297 | HCDAN16R | alpha-1 collagen (I) [Gallus gallus] Length = | gi\|555432 | 2 | 133 | 77 | 88 | HCDAN16 |
| | | 143 | | | | | | |
| 298 | HCEOE88R | amplaxin [Homo sapiens] | gi\|182087 | 1 | 291 | 93 | 94 | HCEOE88 |
| | | >pir\|A48063\|A48063 mammary | | | | | | |
| | | tumor/squamous cell carcinoma-associated | | | | | | |
| | | protein EMS 1 - human Length = 550 | | | | | | |
| 299 | HALSK30R | angiogenin [Homo sapiens] | gi\|178250 | 189 | 416 | 74 | 76 | HALSK30 |
| | | >pir\|A90498\|NRHUAG angiogenin | | | | | | |
| | | precursor - human | | | | | | |
| | | >sp\|PO3950\|ANGI_HUMAN | | | | | | |
| | | ANGIOGENIN PRECURSOR (EC 3.1.27.- | | | | | | |
| | | ). Length = 147 | | | | | | |
| 300 | HDRME43R | anonymous [Homo sapiens] | gi\|388012 | 2 | 346 | 94 | 95 | HDRME43 |
| | | >pir\|I39463\|I39463 gene anonymous protein | | | | | | |
| | | - human >sp\|Q13769\|Q13769 | | | | | | |
| | | ANONYMOUS. Length = 683 | | | | | | |
| 301 | HHEFA24R | APP-binding protein 1 [Rattus norvegicus] | gi\|4099878 | 10 | 177 | 63 | 65 | HHEFA24 |
| | | >sp\|G4099878\|G4099878 APP-BINDING | | | | | | |
| | | PROTEIN 1. Length = 534 | | | | | | |
| 302 | HSSGC52R | argininosuccinate synthetase [Bos taurus] | gi\|162697 | 1 | 438 | 94 | 95 | HSSGC52 |
| | | >sp\|P14568\|ASSY_BOVIN | | | | | | |
| | | ARGININOSUCCINATE SYNTHASE (EC | | | | | | |
| | | 6.3.4.5) (CITRULLINE--ASPARTATE | | | | | | |
| | | LIGASE). Length = 412 | | | | | | |
| 303 | HCYBN49R | ATP synthase beta subunit precursor [Homo | gi\|179281 | 56 | 445 | 97 | 97 | HCYBN49 |
| | | sapiens] >pir\|A33370\|A33370 H+- | | | | | | |
| | | transporting ATP synthase (EC 3.6.1.34) | | | | | | |
| | | beta chain precursor, mitochondrial - human | | | | | | |
| | | >sp\|PO6576\|ATPB_HUMAN ATP | | | | | | |
| | | SYNTHASE BETA CHAIN, | | | | | | |
| | | MITOCHONDRIAL PRECURSOR (EC | | | | | | |
| | | 3.6.1.34). >gi\|28931 be | | | | | | |
| 304 | HWMGB90R | ATP synthase subunit e [Homo sapiens] | gi\|2605592 | 1 | 165 | 58 | 61 | HWMGB90 |
| | | >sp\|P56385\|ATPJ_HUMAN ATP | | | | | | |
| | | SYNTHASE E CHAIN, | | | | | | |
| | | MITOCHONDRIAL (EC 3.6.1.34). {SUB | | | | | | |
| | | 2-69 } Length = 69 | | | | | | |
| 305 | HTEAW21R | ATPase coupling factor 6 subunit [Homo | gi\|179275 | 47 | 259 | 93 | 93 | HTEAW21 |
| | | sapiens] >pir\|JT0563\|JT0563 coupling factor | | | | | | |
| | | 6 precursor, mitochondrial - human | | | | | | |
| | | >sp\|P18859\|ATPR_HUMAN ATP | | | | | | |
| | | SYNTHASE COUPLING FACTOR 6, | | | | | | |
| | | MITOCHONDRIAL PRECURSOR (EC | | | | | | |
| | | 3.6.1.34) (F6). Length = 108 | | | | | | |
| 306 | HCQCV96R | ATPase subunit 6 [Homo sapiens] | gnl\|PID\|d1007873 | 147 | 368 | 58 | 61 | HCQCV96 |
| | | >sp\|Q34772\|Q34772 ATP SYNTHASE A | | | | | | |
| | | CHAIN (EC 3.6.1.34). Length = 226 | | | | | | |
| 307 | HLTDN74R | autotaxin-t [Homo sapiens] | gil\|160616 | 2 | 118 | 85 | 85 | HLTDN74 |
| | | >sp\|Q13822\|Q13822 AUTOTAXIN-T. | | | | | | |
| | | >gnl\|PID\|d1008938 phosphodiesterase I | | | | | | |
| | | alpha [Homo sapiens] {SUB 1-45} Length = | | | | | | |
| | | 863 | | | | | | |
| 308 | HIDABV61R | B-creatine kinase [Gallus gallus] Length = | gi\|211524 | 3 | 230 | 93 | 100 | HDABV61 |
| | | 65 | | | | | | |
| 309 | H2LAQ68R | beta prime cop [Bos taurus] | gi\|312732 | 127 | 558 | 100 | 100 | H2LAQ68 |
| | | >pir\|S35321\|S35312 coatomer complex beta | | | | | | |
| | | chain - bovine >sp\|P35605\|COPP_BOVIN | | | | | | |
| | | COATOMER BETA′ SUBUNIT (BETA′- | | | | | | |
| | | COAT PROTEIN) (BETA′-COP) (P102). | | | | | | |
| | | {SUB 2-906} Length = 906 | | | | | | |
| 310 | HDTLN42R | beta-2-microglobulin [Pan troglodytes] | gi\|176827 | 2 | 361 | 86 | 86 | HDTLN42 |
| | | >gi\|177065 beta-2-microglobulin [Gorilla | | | | | | |
| | | gorilla] >gnl\|PID\|d1036168 (AB021288) | | | | | | |
| | | beta 2-microglobulin [Homo sapiens] | | | | | | |
| | | >pir\|A90976\|MQHUB2 beta-2- | | | | | | |
| | | microglobulin precursor - human | | | | | | |
| | | >pir\|I36963\|I36963 beta-2-microglobulin pre | | | | | | |
| 311 | HULFN47R | beta-2-microglobulin [Pan troglodytes] | gi\|176827 | 3 | 449 | 88 | 89 | HULFN47 |
| | | >gi\|177065 beta-2-microglobulin [Gorilla | | | | | | |
| | | gorilla] >gnl\|PID\|d1036168 (AB021288) | | | | | | |
| | | beta 2-microglobulin [Homo sapiens] | | | | | | |
| | | >pir\|A90976\|MGHUB2 beta-2- | | | | | | |
| | | microglobulin precursor - human | | | | | | |
| | | >pir\|369631\|36963 beta-2-microglobulin pre | | | | | | |
| 312 | HCRMI41R | | | 1 | 528 | | | HCRMJ41 |
| 313 | HWLJP53R | | | 2 | 499 | | | HWLIPS3 |
| 314 | HBAAD6OR | | | 2 | 463 | | | HBAAD60 |
| 315 | HCROA35R | | | 3 | 500 | | | HCROA35 |
| 316 | HCROM64R | | | 201 | 512 | | | HCROM64 |
| 317 | HEOPS84R | | | 2 | 388 | | | HEOPS84 |
| 318 | HKBAG82R | | | 32 | 265 | | | HKBAG82 |
| 319 | HUTSB76R | | | 188 | 418 | | | HUTSB76 |
| 320 | HWLJS67R | | | 384 | 662 | | | HWLJS67 |
| 321 | HWLLZ82R | | | 2 | 133 | | | HWLLZ82 |
| 322 | HCROM20R | | | 351 | 557 | | | HCROM20 |
| 323 | HDQMC24R | | | 1 | 144 | | | HDQMC24 |
| 324 | HOCTD89R | | | 212 | 352 | | | HOCTD89 |
| 325 | HTGAZ53R | | | 198 | 341 | | | HTGAZ53 |
| 326 | HWLKZ47R | | | 429 | 626 | | | HWLKZ47 |
| 327 | HWLLL51R | | | 204 | 416 | | | HWLLL51 |
| 328 | HRLAJS4R | | | 207 | 548 | | | HRLAJ54 |
| 329 | HBAAD69R | | | 1 | 456 | | | HBAAD69 |
| 330 | HWLJZ72R | | | 25 | 453 | | | HWLJZ72 |
| 331 | HTWMFG06R | | | 43 | 321 | | | HWMFG06 |
| 332 | HPRT065R | biliary glycoprotein a [Homo sapiens] | gi\|179438 | 2 | 166 | 93 | 97 | HPRTO65 |
| | | >gnl\|PID\|d1015047 biliary glycoprotein, | | | | | | |
| | | BGPg [Homo sapiens] >gi\|3172151 | | | | | | |
| | | (AC004785) BGPg_HUMAN [Homo | | | | | | |
| | | sapiens] >pir\|JH0394\|JH0394 biliary | | | | | | |
| | | glycoprotein g precursor - human Length = | | | | | | |
| | | 417 | | | | | | |
| 333 | HUFDC01R | biliary glycoprotein I precursor [Homo | gi\|179440 | 108 | 326 | 87 | 87 | HUFDC01 |
| | | sapiens] >gi\|37198 TM1-CEA preprotein | | | | | | |
| | | [Homo sapiens] >gi\|3172148 (AC004785) | | | | | | |
| | | BGP1_HUMAN [Homo sapiens] | | | | | | |
| | | >pir\|A32164\|A32164 biliary glycoprotein 1 | | | | | | |
| | | precursor - human | | | | | | |
| | | >sp\|P13688\|BGP1_HUMAN BILIARY | | | | | | |
| | | GLYCOPROTEIN 1 PRECURSOR | | | | | | |
| 334 | HWLHY44R | bone-derived growth factor [Homo sapiens] | gi\|203965 | 3 | 413 | 75 | 79 | HWLHY44 |
| | | >sp\|Q13876\|Q13876 BONE-DERIVED | | | | | | |
| | | GROWTH FACTOR (FRAGMENT). | | | | | | |
| | | Length = 793 | | | | | | |
| 335 | HWVLGR92R | brain glycogen phosphorylase [Homo | gi\|307200 | 122 | 238 | 100 | 100 | HWLGR92 |
| | | sapiens] >pir\|A29949\|A29949 glycogen | | | | | | |
| | | phosphorylase (EC 2.4.1.1), brain | | | | | | |
| | | (astrocytoma cell line) - human Length = | | | | | | |
| | | 863 | | | | | | |
| 336 | HCNCQ71R | CAG-isl 7 [Homo sapiens] Length = 213 | gi\|3126984 | 1 | 93 | 66 | 77 | HCNCQ71 |
| 337 | HBMCI28R | carbonic anhydrase I (BC 4.2.1.1) [Homo | gi\|179793 | 81 | 293 | 84 | 84 | HBMCI28 |
| | | sapiens] >gi\|29600 carbonic anhydrase I | | | | | | |
| | | (AA 1-261) [Homo sapiens] | | | | | | |
| | | >pir\|JQ0786\|CRHU1 carbonate dehydratase | | | | | | |
| | | (EC 4.2.1.1)1 - human | | | | | | |
| | | >sp\|P00915\|CAH1_HUMAN CARBONIC | | | | | | |
| | | ANHYDRASEI (EC 4.2.1.1) | | | | | | |
| | | (CARBONATE DEHYDRATASEI). {SU | | | | | | |
| 338 | HWLEN11R | carbonic anhydrase I (EC 4.2.1.1) [Homo | gi\|179793 | 84 | 347 | 80 | 80 | HWLEN11 |
| | | sapiens] >gi\|29600 carbonic anhydrase I | | | | | | |
| | | (AA 1-261) [Homo sapiens] | | | | | | |
| | | >pir\|JQ0786\|CRHU1 carbonate dehydratase | | | | | | |
| | | (EC 4.2.1.1)1 - human | | | | | | |
| | | >sp\|P00915\|CAH1_HUMAN CARBONIC | | | | | | |
| | | ANHYDRASE I (EC 4.2.1.1) | | | | | | |
| | | (CARBONATE DEHYDRATASE I). {SU | | | | | | |
| 339 | HMSDU92R | carbonic anhydrase II [Homo sapiens] | gi\|179772 | 1 | 360 | 76 | 83 | HMSDU92 |
| | | >gi\|179780 carbonic anhydrase II [Homo | | | | | | |
| | | sapiens] >gi\|179795 carbonic anhydrase II | | | | | | |
| | | [Homo sapiens] >gi\|29587 carbonic | | | | | | |
| | | anhydrase II (AA 1-260) [Homo sapiens] | | | | | | |
| | | >pir\|A27175\|CRHU2 carbonate dehydratase | | | | | | |
| | | (EC 4.2.1.1) II - human | | | | | | |
| 340 | HCDBF89R | carbonic anhydrase IV [Homo sapiens] | gi\|409725 | 11 | 160 | 87 | 90 | HCDBF89 |
| | | >gi\|409726 carbonic anhydrase IV [Homo | | | | | | |
| | | sapiens] {SUB 73-294} Length = 294 | | | | | | |
| 341 | HCNDP16R | carboxylesterase hCE-2 [Homo sapiens] | gi\|1407780 | 1 | 252 | 70 | 71 | HCNDP16 |
| | | >sp\|Q16859\|Q16859 | | | | | | |
| | | CARBOXYLESTERASE (EC 3.1.1.1) | | | | | | |
| | | (ALI-ESTERASE) (B-ESTERASE) | | | | | | |
| | | (MONOBUTYRASE) (COCAINE | | | | | | |
| | | ESTERASE) (PROCAINE ESTERASE) | | | | | | |
| | | (METHYLBUTYRASE). Length = 550 | | | | | | |
| 342 | HWLGX53R | carcinoembryonic antigen [Homo sapiens] | gi\|180223 | 19 | 138 | 73 | 73 | HWLGX53 |
| | | >gi\|178677 carcinoembryonic antigen | | | | | | |
| | | precursor [Homo sapiens] | | | | | | |
| | | >pir\|A36319\|A36319 carcinoembryonic | | | | | | |
| | | antigen precursor - human | | | | | | |
| | | >sp\|P06731\|CCEM_HUMAN | | | | | | |
| | | CARCINOEMBRYONIC ANTIGEN | | | | | | |
| | | PRECURSOR (CEA) (MECONIUM | | | | | | |
| | | ANTIGEN 100) (CD66E | | | | | | |
| 343 | HWLEH56R | carcinoembryonic antigen [Homo sapiens] | gi\|471077 | 1 | 453 | 86 | 87 | HWLEH56 |
| | | >gnl\|PID\|e249945 carcinoembryonic antigen | | | | | | |
| | | [Homo sapiens] >gi\|3702266 (AC005797) | | | | | | |
| | | carcinoembryonic antigen CGM2 precursor | | | | | | |
| | | - human [Homo sapiens] | | | | | | |
| | | >pir\|A55811\|A55811 carcinoembryonic | | | | | | |
| | | antigen CGM2 precursor - human >sp\|Q | | | | | | |
| 344 | H2LAD26R | CArG box-binding factor [Mus musculus] | gi\|840648 | 43 | 387 | 98 | 98 | H2LAD26 |
| | | >gnl\|PID\|d1014884 CArG-binding factor-A | | | | | | |
| | | [Mus musculus] >pir\|JQ0448\|JQ0448 | | | | | | |
| | | CArO-binding factor-A - mouse | | | | | | |
| | | >sp\|Q99020\|CABA_MOUSE CARG- | | | | | | |
| | | BINDING FACTOR-A (CBF-A). Length | | | | | | |
| | | 285 | | | | | | |
| 345 | HADAF48R | CD99 type II [Homo sapiens] | gi\|2149135 | 2 | 151 | 59 | 59 | HADAF48 |
| | | >sp\|O0518\|O0518 CD99 TYPEII. Length = | | | | | | |
| | | 160 | | | | | | |
| 346 | HCRNV62R | Cdc6-related protein [Homo sapiens] | gi\|1684903 | 2 | 442 | 90 | 91 | HCRNV62 |
| | | >gi\|2465437 (AF022109) HsCdc18p [Homo | | | | | | |
| | | sapiens] >sp\|Q99741\|Q99741 CDC6- | | | | | | |
| | | RELATED PROTEIN. Length = 560 | | | | | | |
| 347 | HCDCI17R | chaperonin-like protein [Homo sapiens] | gi\|517065 | 3 | 137 | 97 | 100 | HCDCI17 |
| | | >pir\|S48087\|S48087 t-complex-type | | | | | | |
| | | molecular chaperone CCT6 - human | | | | | | |
| | | >gi\|184462 chaperonin-like protein [Homo | | | | | | |
| | | sapiens] {SUB 143-53} Length = 531 | | | | | | |
| 348 | HJUAA02R | Cks1 protein homologue [Homo sapiens] | gi\|29977 | 186 | 386 | 96 | 96 | HJUAA02 |
| | | >pir\|A36670\|A36670 protein kinase cdc2 | | | | | | |
| | | complex subunit CKS 1 - human | | | | | | |
| | | >sp\|P3355 1 CKS LHUMAN CYCLIN- | | | | | | |
| | | DEPENDENT KINASES REGULATORY | | | | | | |
| | | SUBUNIT 1 (CKS-1). Length = 79 | | | | | | |
| 349 | HKAKO78R | Cks1 protein homologue [Homo sapiens] | gi\|29979 | 2 | 193 | 77 | 77 | HKAKO78 |
| | | >pir\|B36670\|B36670 protein kinase cdc2 | | | | | | |
| | | complex subunit CKS2 - human | | | | | | |
| | | >sp\|P33552\|CKS2_HUMAN CYCLIN- | | | | | | |
| | | DEPENDENT KINASES REGULATORY | | | | | | |
| | | SUBUNIT 2 (CKS-2). Length = 79 | | | | | | |
| 350 | H2CBD02R | | | 58 | 522 | | | H2CBD02 |
| 351 | HWLCR90R | contains similarity to ATP/GTP-binding site | gi\|1519671 | 1 | 351 | 34 | 60 | HWLCR90 |
| | | motif (PS:PS00017) [Caenorhabditis | | | | | | |
| | | elegans] >sp\|Q94180\|Q94180 SIMILARITY | | | | | | |
| | | TO ATP/GTP-BINDING SITE MOTIF. | | | | | | |
| | | Length = 398 | | | | | | |
| 352 | H2LAK66R | core protein II precursor [Homo sapiens] | gi\|180928 | 126 | 632 | 79 | 79 | H2LAK66 |
| | | >pir\|A32629\|A32629 ubiquinol-- | | | | | | |
| | | cytochrome-c reductase (EC 1.10.2.2) core | | | | | | |
| | | protein II - human Length = 453 | | | | | | |
| 353 | HSDKC65R | CoxII/D-loop DNA fusion protein [Homo | gi\|1374867 | 179 | 346 | 95 | 97 | HSDKC65 |
| | | sapiens] >sp\|Q34777\|Q34777 COXII/D- | | | | | | |
| | | LOOP DNA FUSION PROTEIN | | | | | | |
| | | (FRAGMENT). Length = 125 | | | | | | |
| 354 | H2LAK52R | CUL-2 [Homo sapiens] | gi\|1923243 | 24 | 608 | 100 | 100 | H2LAK52 |
| | | >sp\|Q13617\|CUL2_HUMAN CULLIN | | | | | | |
| | | HOMOLOG 2 (CUL-2). Length = 745 | | | | | | |
| 355 | HKAEG12R | cyclin B1 - human | pir\|A32992\|A3299 | 3 | 392 | 98 | 98 | HKAEG12 |
| | | >sp\|P14635\|CGB1_HUMAN G2/MITOTIC- | 2 | | | | | |
| | | SPECIFIC CYCLIN B1. Length = 433 | | | | | | |
| 356 | HKADP43R | cyclin F [Homo sapiens] | gi\|57678l | 1 | 375 | 71 | 71 | HKADP43 |
| | | >sp\|P4 1002\|CG2_HUMAN G2/MITOTIC- | | | | | | |
| | | SPECIFIC CYCLIN F. Length = 786 | | | | | | |
| 357 | HLXND10R | cystatin B [Homo sapiens] >gi\|1235678 | gi\|291927 | 2 | 355 | 100 | 100 | HLXND10 |
| | | cystatin B [Homo sapiens] | | | | | | |
| | | >sp\|P04080\|CYTB_HUMAN CYSTATIN B | | | | | | |
| | | (LIVER THIOL PROTEINASE | | | | | | |
| | | INHIBITOR) (CPI-B) (STEFIN B). Length = | | | | | | |
| | | 98 | | | | | | |
| 358 | HUSJE17R | cytochrome c oxidase subunit II [Pan | gi\|336514 | 17 | 208 | 97 | 98 | HUSJE17 |
| | | troglodytes] >sp\|P26457\|COX2_PANPA | | | | | | |
| | | CYTOCHROME C OXIDASE | | | | | | |
| | | POLYPEPTTDE II (EC 1.9.3.1). Length = | | | | | | |
| | | 227 | | | | | | |
| 359 | HLHGH82R | cytochrome c oxidase subunit Va preprotein | gi\|50527 | 2 | 106 | 94 | 94 | HLHGH82 |
| | | [Mus musculus] >pir\|S05495\|S05495 | | | | | | |
| | | cytochrome-c oxidase (EC 1.9.3.1) chain Va | | | | | | |
| | | precursor - mouse | | | | | | |
| | | >sp\|P12787\|COXA_MOUSE | | | | | | |
| | | CYTOCHROME C OXIDASE | | | | | | |
| | | POLYPEPTIDE VA PRECURSOR (EC | | | | | | |
| | | 1.9.3.1). Length = 145 | | | | | | |
| 360 | HHBEF06R | cytochrome oxidase III [Homo sapiens] | gi\|13010 | 167 | 373 | 75 | 80 | HHBEF06 |
| | | >pir\|A00482\|OTHU3 cytochrome-c oxidase | | | | | | |
| | | (EC 1.9.3.1) chain III - human | | | | | | |
| | | mitochondrion (SGC1) | | | | | | |
| | | >sp\|P00414\|C0X3_HUMAN | | | | | | |
| | | CYTOCHROME C OXIDASE | | | | | | |
| | | POLYPEPTIDE III (EC 1.9.3.1). | | | | | | |
| | | >gi\|2245564 (AF004341) cytochrome c | | | | | | |
| | | oxidase subunit I | | | | | | |
| 361 | HISCW28R | cytochrome oxidase subunit II [Homo | gi\|530069 | 121 | 312 | 83 | 86 | HISCW28 |
| | | sapiens] >gi\|530071 cytochrome oxidase | | | | | | |
| | | subunit II [Homo sapiens] >gi\|530073 | | | | | | |
| | | cytochrome oxidase subunit II [Homo | | | | | | |
| | | sapiens] >gi\|530077 cytochrome oxidase | | | | | | |
| | | subunit II [Homo sapiens] >gi\|337187 | | | | | | |
| | | cytochrome oxidase subunit II [ | | | | | | |
| 362 | HODEN42R | cytochrome oxidase subunit II [Homo | gi\|530069 | 302 | 469 | 68 | 71 | HODEN42 |
| | | sapiens] >gi\|530071 cytochrome oxidase | | | | | | |
| | | subunit II [Homo sapiens] >gi\|530073 | | | | | | |
| | | cytochrome oxidase subunit II [Homo | | | | | | |
| | | sapiens] >gi\|530077 cytochrome oxidase | | | | | | |
| | | subunit II [Homo sapiens] >gi\|337187 | | | | | | |
| | | cytochrome oxidase subunit II [ | | | | | | |
| 363 | HOEMM43R | cytochrome oxidase subunit II [Homo | gi\|530069 | 1 | 180 | 64 | 67 | HOEMM43 |
| | | sapiens] >gi\|530071 cytochrome oxidase | | | | | | |
| | | subunit II [Homo sapiens] >gi\|530073 | | | | | | |
| | | cytochrome oxidase subunit II [Homo | | | | | | |
| | | sapiens] >gi\|530077 cytochrome oxidase | | | | | | |
| | | subunit II [Homo sapiens] >gi\|337187 | | | | | | |
| | | cytochrome oxidase subunit II [ | | | | | | |
| 364 | HPIAK29R | cytocbrome oxidase subunit II [Homo | gi\|530069 | 295 | 441 | 63 | 70 | HPJAK29 |
| | | sapiens] >gi\|530071 cytochrome oxidase | | | | | | |
| | | subunit II [Homo sapiens] >gi\|530073 | | | | | | |
| | | cytochrome oxidase subunit II [Homo | | | | | | |
| | | sapiens] >gi\|530077 cytochrome oxidase | | | | | | |
| | | subunit II [Homo sapiens] >gi\|337187 | | | | | | |
| | | cytochrome oxidase subunit II [ | | | | | | |
| 365 | HUFAR71R | cytocbrome oxidase subunit II [Homo | gi\|530069 | 128 | 367 | 82 | 85 | HUFAR71 |
| | | sapiens] >gi\|530071 cytochrome oxidase | | | | | | |
| | | subunit II [Homo sapiens] >gi\|530073 | | | | | | |
| | | cytochrome oxidase subunit II [Homo | | | | | | |
| | | sapiens] >gi\|530077 cytochrome oxidase | | | | | | |
| | | subunit II [Homo sapiens] >gi\|337187 | | | | | | |
| | | cytochrome oxidase subunit II [ | | | | | | |
| 366 | HHEUL74R | cytochrome oxidase subunit II [Homo | gi\|530075 | 3 | 227 | 70 | 74 | HHEUL74 |
| | | sapiens] >sp\|Q37526IQ37526 | | | | | | |
| | | CYTOCHROME C OXIDASE | | | | | | |
| | | POLYPEPTIDE II (BC 1.9.3.1). Length = | | | | | | |
| | | 227 | | | | | | |
| 367 | H2LAY36R | cytosolic malate dehydrogenase [Homo | gnl\|PID\|d1010156 | 10 | 609 | 84 | 88 | H2LAY36 |
| | | sapiens] >gi\|3133269 malate dehydrogenase | | | | | | |
| | | [Homo sapiens] | | | | | | |
| | | >sp\|P40925\|MDHC_HUMAN MALATE | | | | | | |
| | | DEHYDROGENASE, CYTOPLASMIC | | | | | | |
| | | (EC 1.1.1.37). {SUB 2-334} Length = 334 | | | | | | |
| 368 | HOECI21R | decay-accelerating factor precursor [Homo | gi\|181463 | 3 | 548 | 73 | 75 | HOECI21 |
| | | sapiens] >gnl\|PID\|d1023771 (AB003312) | | | | | | |
| | | decay accelerating factor [Homo sapiens] | | | | | | |
| | | {SUB 286-340} Length = 376 | | | | | | |
| 369 | HKAFY51R | desmoglein 2 [Homo sapiens] | gi\|416178 | 1 | 429 | 100 | 100 | HKAFY51 |
| | | >pir\|S38673\|S38673 desmoglein 2 - human | | | | | | |
| | | >sp\|Q14126\|DSG2_HUMAN | | | | | | |
| | | DESMOGLEIN 2 PRECURSOR (HDGC). | | | | | | |
| | | Length = 1117 | | | | | | |
| 370 | HMCAR63R | diazepam binding inhibitor [Homo sapiens] | gi\|181478 | 3 | 335 | 100 | 100 | HMCAR63 |
| | | Length = 104 | | | | | | |
| 371 | HWMAN06R | dopamine- and cAMP-regulated neuronal | gi\|972053 | 1 | 222 | 83 | 83 | HWMAN06 |
| | | phosphoprotein [Sus scrofa] | | | | | | |
| | | >sp\|Q29277\|IPPD_PIG DOPAMINE- AND | | | | | | |
| | | CAMP-REGULATED NEURONAL | | | | | | |
| | | PHOSPHOPROTETN (DARPP-32) | | | | | | |
| | | (FRAGMENT). Length = 137 | | | | | | |
| 372 | HDPLD04R | early growth response 2 protein (EGR2) - | pir\|A40492\|A4049 | 1 | 459 | 69 | 70 | HDPLD04 |
| | | human >gi\|181987 early growth response 2 | 2 | | | | | |
| | | protein [Homo sapiens] {SUB 51-456} | | | | | | |
| | | Length = 456 | | | | | | |
| 373 | HCEGK04R | elongation factor 2 [Gallus gallus] | gi\|1184958 | 87 | 182 | 95 | 95 | HCEGK04 |
| | | >sp\|Q90705\|EF2_CHICK ELONGATION | | | | | | |
| | | FACTOR 2 (EF-2). {SUB 2-858} Length = | | | | | | |
| | | 858 | | | | | | |
| 374 | HWLMB57R | epidermal growth factor receptor kinase | gi\|530823 | 1 | 186 | 93 | 93 | HWLMB57 |
| | | substrate [Homo sapiens] | | | | | | |
| | | >pir\|I38728\|I38728 epidermal growth factor | | | | | | |
| | | receptor kinase substrate - human | | | | | | |
| | | >sp\|Q12929\|EPS8_HUMAN EPIDERMAL | | | | | | |
| | | GROWTH FACTOR RECEPTOR KINASE | | | | | | |
| | | SUBSTRATE EPS8. Length = 822 | | | | | | |
| 375 | HHFHE93R | epidermal growth factor receptor precursor | gi\|181980 | 1 | 180 | 89 | 89 | HHFHF93 |
| | | [Homo sapiens] | | | | | | |
| | | >sp\|P21860\|ERB3_HUMAN ERBB-3 | | | | | | |
| | | RECEPTOR PROTEIN-TYROSINE | | | | | | |
| | | KINASE PRECURSOR (EC 2.7.1.112). | | | | | | |
| | | >gnl\|PID\|e3048O9 unnamed protein product | | | | | | |
| | | [Homo sapiens] {SUB 1-271 Length = 1342 | | | | | | |
| 376 | HCDEM69R | epiligrin alpha 3 subunit [Homo sapiens] | gi\|551597 | 136 | 282 | 95 | 95 | HCDEM69 |
| | | >pir\|A55347\|A55347 adhesive ligand | | | | | | |
| | | epiligrin, alpha-3 chain form A precursor - | | | | | | |
| | | human >sp\|Q16787\|LMA3_HUMAN | | | | | | |
| | | LAMININ ALPHA-3 CHAIN | | | | | | |
| | | PRECURSOR (EPILIGRIN 170 KD | | | | | | |
| | | SUBUNIT) (E170). Length = 1713 | | | | | | |
| 377 | HCHNP50R | epithelial cell marker protein 1 [Homo | gi\|187302 | 54 | 218 | 94 | 94 | HCHNP50 |
| | | sapiens] >pir\|S38956\|S38956 epithelial cell | | | | | | |
| | | marker protein 1 - human Length = 248 | | | | | | |
| 378 | HAJAW27R | ERF-1 gene product [Homo sapiens] | gi\|825653 | 3 | 488 | 100 | 100 | HAJAW27 |
| | | >pir\|S34854\|S34854 epidermal growth | | | | | | |
| | | factor-response factor 1 - human >gi\|972116 | | | | | | |
| | | ERF-1 protein [Sus scrofa] {SUB 299-337} | | | | | | |
| | | Length = 338 | | | | | | |
| 379 | HAICY55R | G-rich sequence factor-1 [Homo sapiens] | gi\|517196 | 3 | 374 | 50 | 50 | HAICY55 |
| | | >gi\|517196 G-rich sequence factor-1 [Homo | | | | | | |
| | | sapiens] >sp\|Q12849\|GRF1_HUMAN G- | | | | | | |
| | | RICH SEQUENCE FACTOR-1 (GRSF-1). | | | | | | |
| | | >pir\|S48081\|S48081 GRSF-1 protein - | | | | | | |
| | | human (fragment) {SUB 94-424 } Length = | | | | | | |
| | | 424 | | | | | | |
| 380 | HWLIA38R | gap junction protein (aa 1-283) [Homo | gi\|31647 | 3 | 455 | 82 | 85 | HWLJA38 |
| | | sapiens] >pir\|B29005\|B29005 gap junction | | | | | | |
| | | protein Cx32 - human | | | | | | |
| | | >sp\|P08034\|CXB_HUMAN GAP | | | | | | |
| | | JUNCTION BETA-1 PROTEIN | | | | | | |
| | | (CONNEXIN 32) (CX32) (GAP | | | | | | |
| | | JUNCTION 28 KD LIVER PROTEIN). | | | | | | |
| | | Length = 283 | | | | | | |
| 381 | HBXCL69R | glutamine--phenylpyruvate aminotransferase | gi\|758591 | 81 | 419 | 61 | 67 | HBXCL69 |
| | | [Homo sapiens] >pir\|S69001\|S52790 | | | | | | |
| | | glutamine--phenylpyruvate transaminase | | | | | | |
| | | (EC 2.6.1.64) - human >sp\|Q16773\|Q16773 | | | | | | |
| | | GLUTAMINE--PHENYLPYRUVATE | | | | | | |
| | | AMINOTRANSFERASE (EC 2.6.1.64) | | | | | | |
| | | (GLUTAMINE TRANSAMINASE K). | | | | | | |
| | | Length = 422 | | | | | | |
| 382 | H2LAP90R | glutathione peroxidase [Homo sapiens] | gi\|488476 | 234 | 545 | 97 | 97 | H2LAP90 |
| | | Length = 202 | | | | | | |
| 383 | HCQCR94R | glutathione peroxidase-GI [Homo sapiens] | gi\|579930 | 1 | 114 | 95 | 95 | HCQCR94 |
| | | Length = 190 | | | | | | |
| 384 | HTELE03R | glutathione peroxidase-GI [Homo sapiens] | gi\|579930 | 14 | 202 | 100 | 100 | HTELE03 |
| | | Length = 190 | | | | | | |
| 385 | HJMBN86R | glutathione-insulin transhydrogenase (216 | gi\|31746 | 2 | 202 | 97 | 100 | HJMBN86 |
| | | AA) [Homo sapiens] Length = 216 | | | | | | |
| 386 | HSKJC32R | GTP:AMP phosphotransferase (EC 2.7.4.10) | gi\|163528 | 1 | 642 | 89 | 94 | HSKJC32 |
| | | [Bos taurus] >gnl\|PID\|d1001680 | | | | | | |
| | | mitochondrial adenylate kinase isozyme 3 | | | | | | |
| | | [Bos taurus] >pir\|A34442\|A34442 | | | | | | |
| | | nucleoside-triphosphate--adenylate kinase | | | | | | |
| | | (EC 2.7.4.10) 3, mitochondrial - bovine | | | | | | |
| | | >sp\|P08760\|KAD3_BOVIN GTP:AM | | | | | | |
| 387 | HOEAZ62R | GTP_binding protein [Sus scrofa] | gi\|971836 | 2 | 100 | 89 | 92 | HOEAZ62 |
| | | >sp\|Q29222\|Q29222 GTP_BINDING | | | | | | |
| | | PROTEIN (FRAGMENT). Length = 92 | | | | | | |
| 388 | HAOAG76R | guanine nucleotide-binding protein G-s- | gi\|386746 | 1 | 369 | 86 | 86 | HAOAG76 |
| | | alpha-4 [Homo sapiens] >gi\|31913 alpha-S1 | | | | | | |
| | | (AA 1-380) [Homo sapiens] | | | | | | |
| | | >pir\|C3 1927\|RGHUA1 GTP-binding | | | | | | |
| | | regulatory protein Gs alpha chain (adenylate | | | | | | |
| | | cyclase-stimulating), splice form 4 - human | | | | | | |
| | | Length = 380 | | | | | | |
| 389 | HCIAD45R | guanylin [Homo sapiens] >gi\|306824 | gi\|183415 | 2 | 262 | 75 | 81 | HCIAD45 |
| | | guanylin [Homo sapiens] | | | | | | |
| | | >pir\|A46279\|A46279 guanylin precursor - | | | | | | |
| | | human >sp\|Q02747\|GUAN_HUMAN | | | | | | |
| | | GUANYLIN PRECURSOR | | | | | | |
| | | (GUANYLATE CYCLASE ACTIVATOR | | | | | | |
| | | 2A). Length = 115 | | | | | | |
| 390 | H2MAC82R | H+-ATP synthase subunit b [Homo sapiens] | gi\|509291 | 214 | 513 | 95 | 96 | H2MAC82 |
| | | >pir\|JQ1144\|JQ1144 H+-transporting ATP | | | | | | |
| | | synthase (EC 3.6.1.34) chain b precursor, | | | | | | |
| | | mitochondrial - human | | | | | | |
| | | >sp\|P24539\|ATPF_HUMAN ATP | | | | | | |
| | | SYNTHASE B CHAIN, | | | | | | |
| | | MITOCHONDRIAL PRECURSOR (EC | | | | | | |
| | | 3.6.1.34). Length = 256 | | | | | | |
| 391 | H2LAJ41R | heat shock protein [Homo sapiens] | gi\|703087 | 75 | 632 | 98 | 98 | H2LAJ41 |
| | | >pir\|A32319\|HHHU86 heat shock protein | | | | | | |
| | | 90-alpha - human >gi\|184419 heat shock | | | | | | |
| | | protein 86 [Homo sapiens] {SUB 1-312} | | | | | | |
| | | >gnl\|PID\|d1014121 heat shock protein 90 | | | | | | |
| | | [Homo sapiens] {SUB 582-732} Length = | | | | | | |
| | | 732 | | | | | | |
| 392 | HWLGH40R | HKL1 [Homo sapiens] >sp\|O60765\|O60765 | gnl\|PID\|d1026110 | 1 | 597 | 92 | 93 | HWLGH40 |
| | | HKL1. Length = 605 | | | | | | |
| 393 | HBJFH33R | HLA DP4 beta-chain [Homo sapiens] | gi\|306858 | 97 | 369 | 88 | 92 | HBJFH33 |
| | | >gi\|296648 pot. hla-dp-beta 1 [Homo | | | | | | |
| | | sapiens] >pir\|A02229\|HLHUPB MHC class | | | | | | |
| | | II histocompatibility antigen HLA-DP beta 1 | | | | | | |
| | | chain (allele DPB4.1) precursor - human | | | | | | |
| | | >sp\|P04440\|HB2P_HUMAN HLA CLASS | | | | | | |
| | | II HISTOCOMPATIBILITY ANTIGEN, | | | | | | |
| 394 | HISDV92R | homeobox c1 protein [Homo sapiens] | gi\|306878 | 51 | 404 | 72 | 72 | HISDV92 |
| | | >sp\|Q64081\|Q64081 HOX-B\|HOX-2 | | | | | | |
| | | {CLONE 17A}. {SUB 137-196} Length = | | | | | | |
| | | 217 | | | | | | |
| 395 | HMQCG89R | | | 158 | 388 | | | HMQCG89 |
| 396 | HE9QB35R | Hox5.4 gene product (AA 1-95) [Homo | gi\|32400 | 1 | 345 | 100 | 100 | HE9QB35 |
| | | sapiens] >pir\|B32830\|B32830 homeotic | | | | | | |
| | | protein Hox D8 - human (fragment) | | | | | | |
| | | >sp\|P13378\|HXD8_HUMAN HOMEOBOX | | | | | | |
| | | PROTEIN HOX-D8 (HOX-4E) (HOX-5.4) | | | | | | |
| | | (FRAGMENT). Length = 95 | | | | | | |
| 397 | HDABQ50R | hsOrc2p [Homo sapiens] | gi\|1113107 | 204 | 368 | 91 | 91 | HDABQ50 |
| | | >sp\|Q13416\|ORC2_HUMAN ORIGIN | | | | | | |
| | | RECOGNITION COMPLEX PROTEIN, | | | | | | |
| | | SUBUNIT 2. Length = 577 | | | | | | |
| 398 | HNTEG83R | hydroxymethylglutaryl-CoA lyase [Homo | gl\|84503 | 2 | 391 | 83 | 83 | HNTEG83 |
| | | sapiens] >pir\|A45470\|A45470 | | | | | | |
| | | hydroxymethylglutaryl-CoA lyase (EC | | | | | | |
| | | 4.1.3.4) -human | | | | | | |
| | | >sp\|P35914\|HMGL_HUMAN | | | | | | |
| | | HYDROXYMETHYLGLUTARYL-COA | | | | | | |
| | | LYASE PRECURSOR (EC 4.1.3.4) (HMG- | | | | | | |
| | | COA LYASE) (HL) (3-HYDROXY-3- | | | | | | |
| | | METHYLGLUTARATE-COA LYASE | | | | | | |
| 399 | HFVHM90R | hydroxymethylglutaryl-CoA synthase | gi\|619877 | 2 | 319 | 92 | 94 | HFVHM90 |
| | | [Homo sapiens] >gi\|2463646 3-hydroxy-3- | | | | | | |
| | | methylglutaryl CoA synthase [Homo | | | | | | |
| | | sapiens] >pir\|S71623\|S71623 | | | | | | |
| | | hydroxymethylglutaryl-CoA synthase (EC | | | | | | |
| | | 4.1.3.5) precursor, mitochondrial - human | | | | | | |
| | | >sp\|P54868\|HMCM_HUMAN | | | | | | |
| | | HYDROXYMETHYLGLU | | | | | | |
| 400 | HOSNE90R | hypothetical 18K protein (rRNA) - goldfish | pir\|JC1348\|JC1348 | 257 | 340 | 59 | 62 | HOSNE90 |
| | | mitochondrion (SGC1) Length = 166 | | | | | | |
| 401 | HSDJE56R | hypothetical 18K protein (rRNA) - goldfish | pir\|JC1348\|JC1348 | 2 | 70 | 67 | 73 | HSDJE56 |
| | | mitochondrion (SGC1) Length = 166 | | | | | | |
| 402 | HWLGC87R | hypothetical protein 2 (rRNA external | pir\|S12206\|S12206 | 1 | 135 | 96 | 96 | HWLGC87 |
| | | transcribed spacer) - mouse Length = 153 | | | | | | |
| 403 | HTPAC28R | 1-plastin [Homo sapiens] | gi\|405230 | 68 | 325 | 92 | 93 | HTPAC28 |
| | | >pir\|A56536\|A56536 plastin, intestine- | | | | | | |
| | | specific - human | | | | | | |
| | | >sp\|Q 14651\|PLSI_HUMAN I-PLASTIN | | | | | | |
| | | (INTESTINE-SPECIFIC PLASTIN). | | | | | | |
| | | Length = 629 | | | | | | |
| 404 | HMCGN07R | ICK = INTRON-CONTAINING | sp\|G998972\|G9989 | 1 | 498 | 98 | 99 | HMCGN07 |
| | | KALLIKREIN {ALTERNATIVELY | 72 | | | | | |
| | | SPLICED, INTRON 2}. Length = 216 | | | | | | |
| 405 | HFIBV16R | Id1 gene product [Homo sapiens] | gi\|457785 | 2 | 238 | 89 | 89 | HFJBV16 |
| | | >pir\|S47524\|S47524 gene Id1 protein - | | | | | | |
| | | human Length = 154 | | | | | | |
| 406 | HBMTT01R | Ig alpha-2 chain C region (allotype A2m(1)) | pir\|B22360\|B2236 | 2 | 154 | 80 | 80 | HBMTT01 |
| | | - human >sp\|P01877\|ALC2_HUMAN IG | 0 | | | | | |
| | | ALPHA-2 CHAIN C REGION. >gi\|184761 | | | | | | |
| | | Ig alpha-2 H-chain constant region (aa at | | | | | | |
| | | 166) [Homo sapiens] {SUB 2-340} Length = | | | | | | |
| | | 340 | | | | | | |
| 407 | HBMVM66R | Ig gamma chain C region - chimpanzee | pir\|PT0207\|PT020 | 148 | 435 | 70 | 77 | HBMVM66 |
| | | >gnl\|PID\|e40518 CH2 domain of IgG [Pan | 7 | | | | | |
| | | troglodytes] {SUB 25-134} | | | | | | |
| | | >gnl\|PID\|e40517 CH3 domain of IgG [Pan | | | | | | |
| | | troglodytes] {SUB 135-234} Length = 234 | | | | | | |
| 408 | HABGC21R | Ig heavy chain (DOT) - human (fragment) | pir\|S69131\|S69131 | 1 | 228 | 50 | 56 | HABGC21 |
| | | >gnl\|PID\|e4381 reading frame CH1 [Homo | | | | | | |
| | | sapiens] {SUB 121-218} Length = 241 | | | | | | |
| 409 | HWLGE72R | Ig kappa light chain (VJ) [Homo sapiens] | gi\|441375 | 11 | 421 | 75 | 79 | HWLGE72 |
| | | >pir\|S40343jS40343 Ig kappa chain V-J | | | | | | |
| | | region - human Length 128 | | | | | | |
| 410 | HLIBX69R | 1gM B-cell receptor associated protein | gi\|54 1734 | 1 | 279 | 100 | 100 | NLTBX69 |
| | | (BAP) 37 [Mus musculus] | | | | | | |
| | | >pir\|S46996\|S46996 B-cell receptor- | | | | | | |
| | | associated protein BAP37 - mouse | | | | | | |
| | | >sp\|Q61336\|Q61336 BCR-ASSOCIATED | | | | | | |
| | | PROTEIN 37 (IGM B-CELL RECEPTOR | | | | | | |
| | | ASSOCIATED PROTEIN 37) (BAP). | | | | | | |
| | | Length = 298 | | | | | | |
| 411 | HWAFW14R | immunoglobulin from VH4 family [Homo | gi\|37725 | 2 | 139 | 94 | 100 | HWAFW14 |
| | | sapiens] >pir\|S13519\|S13519 Ig heavy chain | | | | | | |
| | | V region precursor - human >gi\|553385 | | | | | | |
| | | immunoglobulin heavy chain [Homo | | | | | | |
| | | sapiens] {SUB 24-125} Length = 147 | | | | | | |
| 412 | HWAFK04R | immunoglobulin heavy chain [Homo | gi\|567126 | 48 | 473 | 78 | 86 | HWAFK04 |
| | | sapiens] >pir\|E36005\|E36005 Ig heavy chain | | | | | | |
| | | V region (M72) - human {SUB 36-157} | | | | | | |
| | | Length = 157 | | | | | | |
| 413 | HEPNA09R | immunoglobulin heavy chain [Homo | gi\|567127 | 3 | 206 | 81 | 87 | HEPNA09 |
| | | sapiens] >pir\|G36005\|G36005 Ig heavy | | | | | | |
| | | chain V region (M74) - human {SUB 38- | | | | | | |
| | | 158} Length = 158 | | | | | | |
| 414 | HCRQD03R | immunoglobulin heavy chain [Homo | gi\|567128 | 1 | 573 | 76 | 82 | HCRQD03 |
| | | sapiens] Length = 152 | | | | | | |
| 415 | HAPSK08R | immunoglobulin heavy chain variable region | gi\|1791017 | 1 | 363 | 79 | 81 | HAPSK08 |
| | | [Homo sapiens] >gi\|903667 Ig heavy chain | | | | | | |
| | | variable region VH [Homo sapiens] {SUB | | | | | | |
| | | 1-97} >gi\|976311 This CDS feature is | | | | | | |
| | | included to show the translation of the | | | | | | |
| | | corresponding V_segment. Presently | | | | | | |
| | | translation qualifie | | | | | | |
| 416 | HBMTS11R | immunoglobulin IgH heavy chain Fd | gi\|468237 | 1 | 375 | 68 | 70 | HBMTS11 |
| | | fragment [Homo sapiens] Length = 221 | | | | | | |
| 417 | HCNDR62R | immunoglobulin kappa light chain [Homo | gnl\|PID\|e224083 | 245 | 337 | 100 | 100 | HCNDR62 |
| | | sapiens] >pir\|A37927\|A37927 Ig kappa | | | | | | |
| | | chain C region (allotype Inv(1,2)) - human | | | | | | |
| | | (fragment) {SUB 138-236} Length = 236 | | | | | | |
| 418 | HNJBF13R | immunoglobulin lambda light chain gene | gi\|33702 | 3 | 308 | 90 | 93 | HNJBF13 |
| | | product [Homo sapiens] | | | | | | |
| | | >pir\|S25738\|S25738 Ig lambda chain - | | | | | | |
| | | human Length = 231 | | | | | | |
| 419 | HLYCD69R | immunoglobulin lambda light chain gene | gi\|33712 | 2 | 481 | 86 | 89 | HLYCD69 |
| | | product [Homo sapiens] | | | | | | |
| | | >pir\|825743\|525743 Ig lambda chain - | | | | | | |
| | | human (fragment) Length = 145 | | | | | | |
| 420 | HWAEK89R | immunoglobulin lambda light chain gene | gi\|33730 | 2 | 460 | 87 | 92 | HWAFK89 |
| | | product [Homo sapiens] | | | | | | |
| | | >pir\|S25750\|S25750 Ig lambda chain - | | | | | | |
| | | human Length = 235 | | | | | | |
| 421 | HWCAA53R | immunoglobulin light chain variable region | gi\|465170 | 1 | 342 | 74 | 88 | HWCAA53 |
| | | [Homo sapiens] >gi\|3142470 (AF063703) | | | | | | |
| | | immunoglobulin lambda light chain variable | | | | | | |
| | | region [Homo sapiens] {SUB 20-127 } | | | | | | |
| | | >gi\|575243 immunoglobulin lambda chain | | | | | | |
| | | precursor [Homo sapiens] {SUB 26-127} | | | | | | |
| | | >gnl\|PID\|d0120826 V | | | | | | |
| 422 | HYAAY47R | immunoglobulin light chain variable region | gi\|465168 | 2 | 292 | 70 | 74 | HYAAY47 |
| | | [Homo sapiens] Length = 154 | | | | | | |
| 423 | HMCJF14R | | | 21 | 596 | | | HMCJF14 |
| 424 | HE8QU88R | | | 13 | 141 | | | HE8QU88 |
| 425 | HEVGP11R | L-FABP [Homo sapiens] | gi\|182358 | 29 | 322 | 98 | 98 | HFVGP11 |
| | | >pir\|A22289\|FZHUL fatty acid-binding | | | | | | |
| | | protein, hepatic - human | | | | | | |
| | | >sp\|P07148\|FABL_HUMAN FATTY | | | | | | |
| | | ACID-BINDING PROTEIN, LIVER (L- | | | | | | |
| | | FABP). Length = 127 | | | | | | |
| 426 | HWLQH07R | | | 3 | 554 | | | HWLQH07 |
| 427 | HSIGN24R | 1rp gene product [Homo sapiens] | gi\|895840 | 2 | 250 | 89 | 93 | HSJGN24 |
| | | >pir\|S57723\|S57723 1rp protein - human | | | | | | |
| | | >sp\|Q14764\|MVP_HUMAN MAJOR | | | | | | |
| | | VAULT PROTEIN (MVP) (LUNG | | | | | | |
| | | RESISTANCE-RELATED PROTEIN). | | | | | | |
| | | Length = 896 | | | | | | |
| 428 | HWLKH07R | lysophosphatidic acid acyitransferase-beta | gi\|2155240 | 74 | 298 | 96 | 97 | HWLKH07 |
| | | [Homo sapiens] Length = 278 | | | | | | |
| 429 | HAPQC14R | macrophage capping protein [Homo sapiens] | gi\|187456 | 2 | 538 | 96 | 98 | HAPQC14 |
| | | >pir\|A43358\|A43358 macrophage capping | | | | | | |
| | | protein - human | | | | | | |
| | | >sp\|P40121\|CAPG_HUMAN | | | | | | |
| | | MACROPHAGE CAPPING PROTEIN | | | | | | |
| | | (ACTIN-REGULATORY PROTEIN CAP- | | | | | | |
| | | G). >gi\|S15505 Cap-G [Homo sapiens] | | | | | | |
| | | {SUB 1-172} Length = 348 | | | | | | |
| 430 | HSODB48R | malonyl-CoA decarboxylase (EC 4.1.1.9) - | pir\|A33313\|A3331 | 32 | 466 | 77 | 81 | HSODB48 |
| | | goose >gi\|305323 malonyl CoA | 3 | | | | | |
| | | decarboxylase [Anser anser] {SUB 33-462} | | | | | | |
| | | Length = 462 | | | | | | |
| 431 | HBEAC75R | membrane glycoprotein [Homo sapiens] | gi\|307132 | 2 | 217 | 73 | 79 | HBEAC75 |
| | | Length = 385 | | | | | | |
| 432 | HBGMJ24R | mitochondrial RNA polymerase [Homo | gi\|2114396 | 3 | 479 | 100 | 100 | HBGMJ24 |
| | | sapiens] Length = 1230 | | | | | | |
| 433 | HBJEN94R | mitotic kinase-like protein-1 [Homo sapiens] | gi\|34672 | 1 | 327 | 89 | 89 | HBJEN94 |
| | | >pir\|S28262\|S28262 kinesin-related protein | | | | | | |
| | | MKLP-1 - human | | | | | | |
| | | >sp\|Q02241\|MKLP_HUMAN MITOTIC | | | | | | |
| | | KINESIN-LIKE PROTEIN-1. Length = 960 | | | | | | |
| 434 | HCIAE73R | motor protein [Homo sapiens] Length = 721 | gnl\|PID\|d1005183 | 73 | 324 | 100 | 100 | HCIAE73 |
| 435 | HCNDN88R | mucin 2 precursor, intestinal - human | pir\|A49963\|A4393 | 1 | 171 | 95 | 97 | HCNDN88 |
| | | (fragments) >gi\|186396 mucin [Homo | 2 | | | | | |
| | | sapiens] {SUB 626-1895} >gi\|186398 | | | | | | |
| | | MUC2 [Homo sapiens] {SUB 2037-3020} | | | | | | |
| | | >gi\|188874 intestinal mucin [Homo sapiens] | | | | | | |
| | | {SUB 1916-2193} >gi\|188615 mucin-like | | | | | | |
| | | protein [Homo sapiens] {SUB 23 | | | | | | |
| 436 | HSIDX70R | N-benzoyl-L-tyrosyl-p-amino-benzoic acid | gi\|535475 | 2 | 253 | 94 | 94 | HSIDX70 |
| | | hydrolase alpha subunit [Homo sapiens] | | | | | | |
| | | >pir\|S60193\|HYHUMA meprin A (EC | | | | | | |
| | | 3.4.24.18) alpha chain precursor - human | | | | | | |
| | | >sp\|Q16819\|MEPA_HUMAN MEPRIN A | | | | | | |
| | | ALPHA-SUBUNIT PRECURSOR (EC | | | | | | |
| | | 3.4.24.18) (ENDOPEPT1DASE-2) (N | | | | | | |
| | | BENZOYL-L- | | | | | | |
| 437 | HLWBC39R | Na+/H+ exchanger NEHE-1 isoform [human, | bbs\|143522 | 2 | 388 | 77 | 77 | HLWBC39 |
| | | heart, Peptide, 815 aa] [Homo sapiens] | | | | | | |
| | | >pir\|157487\|157487 Na+/H-1+-exchanging | | | | | | |
| | | protein NHE-1 - human | | | | | | |
| | | >sp\|P19634\|NAH1_HUMAN | | | | | | |
| | | SODIUM/HYDROGEN EXCHANGER 1 | | | | | | |
| | | (NA(+)JH(+) EXCHANGER 1) (NHE-1) | | | | | | |
| | | (NA+/H+ ANTIPORTER, AMILORIDE- | | | | | | |
| | | SENSI | | | | | | |
| 438 | HWLAA06R | NADH dehydrogenase (ubiquinone) (EC | pir\|A00435\|A0043 | 66 | 194 | 86 | 97 | HWLAA06 |
| | | 1.6.5.3) chain 4 - chimpanzee mitochondrion | 5 | | | | | |
| | | (SGC1) (fragment) | | | | | | |
| | | >sp\|P03906\|NU4M_PANTR NADH- | | | | | | |
| | | UBIQUINONE OXIDOREDUCTASE | | | | | | |
| | | CHAIN 4 (EC 1.6.5.3) (FRAGMENT). | | | | | | |
| | | Length = 152 | | | | | | |
| 439 | HASCH25R | NADH-UBIQUINONE | sp\|Q16795\|NUEM | 57 | 143 | 78 | 82 | HASCH25 |
| | | OXIDOREDUCTASE 39 KD SUBUNIT | _HUMAN | | | | | |
| | | PRECURSOR (EC 1.6.5.3) (EC 1.6.99.3) | | | | | | |
| | | (COMPLEX I-39KD) (CI-39KD). | | | | | | |
| | | >gi\|189049 NADH dehydrogenase | | | | | | |
| | | (ubiquinone) [Homo sapiens] { SUB 3-377} | | | | | | |
| | | Length = 377 | | | | | | |
| 440 | HLQGB87R | NADPH--ferrihemoprotein reductase (EC | pir\|A33421\|A6055 | 1 | 411 | 92 | 93 | HLQGB87 |
| | | 1.6.2.4) - human | 7 | | | | | |
| | | >sp\|P16435\|NCPR_HUMAN NADPH- | | | | | | |
| | | CYTOCHROME P450 REDUCTASE (EC | | | | | | |
| | | 1.6.2.4) (CPR). {SUB 2-677} Length = 677 | | | | | | |
| 441 | HFDMD17R | neutrophil gelatinase associated lipocalin | gi\|929657 | 1 | 621 | 74 | 78 | HFDMD17 |
| | | [Homo sapiens] | | | | | | |
| | | >sp\|P80188\|NGAL_HUMAN | | | | | | |
| | | NEUTROPHIL GELATIINASE- | | | | | | |
| | | ASSOCIATED LIPOCALIN PRECURSOR | | | | | | |
| | | (NGAL) (P25) (25 KD ALPHA-2- | | | | | | |
| | | MICROGLOBULIN-RELATED SUBUNIT | | | | | | |
| | | OF MMP-9) (LIPOCALIN-2) | | | | | | |
| | | (ONCOGENE 24P3). Length = 198 | | | | | | |
| 442 | HAOAC69R | nuclear autoantigen [Homo sapiens] | gi\|178689 | 3 | 209 | 88 | 88 | HAOAC69 |
| | | >pir\|A37244\|A37244 nuclear autoantigen | | | | | | |
| | | Sp-100 - human Length = 480 | | | | | | |
| 443 | HWLEQ08R | Nuclear localization signal at AA 569-573, | gi\|291964 | 191 | 364 | 75 | 84 | HWLEQ08 |
| | | 576-580, 579-583; acidic transcr. activ. | | | | | | |
| | | domain 620-640,; homeobox motif 653-676 | | | | | | |
| | | [Homo sapiens] >pir\|A47456\|A47456 down- | | | | | | |
| | | regulated in adenoma (DRA) - human | | | | | | |
| | | >sp\|P40879\|DRA_HUMAN DRA | | | | | | |
| | | PROTEIN (DOWN-REGULATED IN | | | | | | |
| | | ADENO | | | | | | |
| 444 | HKAAV70R | nucleic acid binding protein [Homo sapiens] | gi\|431953 | 1 | 432 | 73 | 73 | HKAAV70 |
| | | >pir\|I38191\|I38191 nucleic acid binding | | | | | | |
| | | protein - human (fragment) | | | | | | |
| | | >sp\|Q15410\|Q15410 NUCLEIC ACID | | | | | | |
| | | BINDING PROTEIN (FRAGMENT). | | | | | | |
| | | Length = 163 | | | | | | |
| 445 | HOCTB64R | ORIGINAL PIGR [unidentified] >gi\|456346 | gnl\|PID\|e307278 | 3 | 212 | 85 | 90 | HOCTB64 |
| | | Polymeric immunoglobulin receptor [Homo | | | | | | |
| | | sapiens] >bbs\|62408 transmembrane | | | | | | |
| | | secretory component, poly-Ig receptor, SC | | | | | | |
| | | [human, colonic adenocarcinoma cell line, | | | | | | |
| | | Peptide, 764 aa] [Homo sapiens] | | | | | | |
| | | >bbs\|113253 transmembrane | | | | | | |
| 446 | HOFNB62R | ornithine decarboxylase [Bos taurus] | gi\|1036793 | 1 | 312 | 85 | 90 | HOFNB62 |
| | | >gi\|163449 omithine decarboxylase [Bos | | | | | | |
| | | taurus] >sp\|P27117\|DC0R_BOVIN | | | | | | |
| | | ORNITHINE DECARBOXYLASE (EC | | | | | | |
| | | 4.1.1.17) (ODC). >gi\|604513 ornithine | | | | | | |
| | | decarboxylase [Bos taurus] {SUB 1-34} | | | | | | |
| | | Length = 461 | | | | | | |
| 447 | HAUAU04R | p22 phagocyte b-cytochrome [Homo | gi\|189106 | 1 | 267 | 87 | 88 | HAUAU04 |
| | | sapiens] >pir\|A2820\|A28201 cytochrome | | | | | | |
| | | b-245 alpha chain - human | | | | | | |
| | | >sp\|P13498\|C24A_HUMAN | | | | | | |
| | | CYTOCHROME B-245 LIGHT CHAIN | | | | | | |
| | | (P22 PHAGOCYTE B-CYTOCHROME) | | | | | | |
| | | (NEUTROPHIL CYTOCHROME B, 22 KD | | | | | | |
| | | POLYPEPTIDE) (P22-PHOX) | | | | | | |
| | | (CYTOCHROME B(558) AL | | | | | | |
| 448 | HNFJE41R | p47-phox [Homo sapiens] | gi\|2754713 | 1 | 423 | 94 | 97 | HNEJE41 |
| | | >sp\|)43842\|O43842 P47-PHOX. Length = | | | | | | |
| | | 390 | | | | | | |
| 449 | HCFOH92R | phosphoprotein phosphatase (EC 3.1.3.16) | pir\|B27430\|B2743 | 2 | 88 | 93 | 93 | HCFOH92 |
| | | catalytic beta chain - pig (fragment) Length = | 0 | | | | | |
| | | 293 | | | | | | |
| 450 | HOUID53R | phosphorylation regulatory protein HP-10- | pir\|A61382\|A6138 | 85 | 213 | 45 | 49 | HOUTD53 |
| | | human Length = 492 | 2 | | | | | |
| 451 | HCRMW41R | polypeptide BM28 [Homo sapiens] Length = | gi\|468704 | 1 | 282 | 100 | 100 | HCRMW41 |
| | | 892 | | | | | | |
| 452 | HOVAX78R | porin [Homo sapiens] >pir\|A45972\|A45972 | gi\|190200 | 2 | 214 | 94 | 98 | HOVAX78 |
| | | mitochondrial porin, long form - human | | | | | | |
| | | >sp\|P45880\|POR29_HUMAN VOLTAGE- | | | | | | |
| | | DEPENDENT ANION-SELECTIVE | | | | | | |
| | | CHANNEL PROTEIN 2 (VDAC2) | | | | | | |
| | | (OUTER MITOCHONDRIAL | | | | | | |
| | | MEMBRANE PROTEIN PORN). | | | | | | |
| | | >gi\|190201 porin [Homo sapiens] {SUB 27- | | | | | | |
| | | 347} Len | | | | | | |
| 453 | HWAEH57R | precursor [Homo sapiens] | gi\|37910 | 1 | 462 | 91 | 93 | HWAEH57 |
| | | >sp\|P06314\|KV4_HUMAN IG KAPPA | | | | | | |
| | | CHAIN PRECURSOR V-IV REGION | | | | | | |
| | | (B17). Length = 134 | | | | | | |
| 454 | HHBHJ76R | presenilin I-463 [Homo sapiens] | gi\|1244638 | 1 | 303 | 98 | 98 | HHBHJ76 |
| | | >pir\|S63683\|S63683 presenilin I-463 - | | | | | | |
| | | human Length = 463 | | | | | | |
| 455 | HBJFA18R | prosomal P27K protein [Homo sapiens] | gi\|35682 | 178 | 402 | 79 | 83 | HBJFA18 |
| | | >gnl\|PID\|1002062 proteasome subunit R- | | | | | | |
| | | IOTA [Rattus sp.] >pir\|S30274\|S30274 | | | | | | |
| | | multicatalytic endopeptidase complex (EC | | | | | | |
| | | 3.4.99.46) iota chain - human | | | | | | |
| | | >pir\|JX0230\|JX0230 multicatalytic | | | | | | |
| | | endopeptidase complex (EC 3.4.99.46) | | | | | | |
| 456 | HCRNE16R | protein kinase [Homo sapiens] | gi\|479173 | 336 | 473 | 73 | 79 | HCRNE16 |
| | | >sp\|P51956\|NEK3_HUMAN | | | | | | |
| | | SERINE/THREONINE-PROTEIN KINASE | | | | | | |
| | | NEK3 (EC 2.7.1.−) (NIMA-RELATED | | | | | | |
| | | PROTEIN KINASE 3) (HSPK 36) | | | | | | |
| | | (FRAGMENT). Length = 459 | | | | | | |
| 457 | HAHEK76R | putative surface glycoprotein [Homo | gnl\|PID\|e188111 | 33 | 440 | 83 | 86 | HAHEK76 |
| | | sapiens] >sp\|P53801\|C211_HUMAN | | | | | | |
| | | PUTATIVE SURFACE GLYCOPROTEIN | | | | | | |
| | | C21ORF1 PRECURSOR (C21ORF3). | | | | | | |
| | | Length = 180 | | | | | | |
| 458 | HEOPT38R | renin-binding protein [Homo sapiens] | gnl\|PID\|d100155 | 12 | 316 | 100 | 100 | HEOPT38 |
| | | >gi\|1302662 renin-binding protein [Homo | | | | | | |
| | | sapiens] >pir\|JX01881\|JX0188 renin-binding | | | | | | |
| | | protein - human Length = 417 | | | | | | |
| 459 | HOSCG81R | ribonucleoprotein La [Homo sapiens] | gi\|337457 | 1 | 297 | 96 | 96 | HOSCG81 |
| | | >sp\|Q15367\|Q15367 | | | | | | |
| | | RIBONUCLEOPROTEIN (LA) | | | | | | |
| | | (FRAGMENT). >gi\|338496 SS-B/La protein | | | | | | |
| | | [Homo sapiens] {SUB 121-171} Length = | | | | | | |
| | | 355 | | | | | | |
| 460 | HTFMD43R | ribosomal protein L39 [Homo sapiens] | gi\|1373419 | 3 | 242 | 100 | 100 | HTFMD43 |
| | | >gnl\|PID\|d1012131 ribosomal protein L39 | | | | | | |
| | | [Homo sapiens] >gi\|575382 ribosomal | | | | | | |
| | | protein L39 [Rattus norvegicus] | | | | | | |
| | | >pir\|JC4229\|R6RT39 ribosomal protein L39 | | | | | | |
| | | - rat >pir\|G02654\|G02654 ribosomal protein | | | | | | |
| | | L39 - human Length = 51 | | | | | | |
| 461 | HDTGQ68R | ribosomal protein L7a large subunit [Homo | gi\|337495 | 43 | 291 | 100 | 100 | HDTGQ68 |
| | | sapiens] >gi\|34203 L7a protein [Homo | | | | | | |
| | | sapiens] >gi\|35512 PLA-X polypeptide | | | | | | |
| | | [Homo sapiens] >gi\|36647 ribosomal protein | | | | | | |
| | | L7a [Homo sapiens] >gi\|56956 ribosomal | | | | | | |
| | | protein L7a (AA 1-266) [Rattus rattus] | | | | | | |
| | | >pir\|S 19717\|R5HU7A | | | | | | |
| 462 | H2LAR73R | ribosomal protein S15a [Rattus norvegicus] | gi\|495273 | 23 | 505 | 100 | 100 | H2LAR73 |
| | | >pir\|JC2234\|JC2234 ribosomal protein S15a | | | | | | |
| | | - rat Length = 130 | | | | | | |
| 463 | HAMFM26R | ribosomal protein 56 kinase 1 [Homo | gi\|292457 | 3 | 458 | 97 | 97 | HAMFM26 |
| | | sapiens] >pir\|I5190\|I151901 ribosomal | | | | | | |
| | | protein S6 kinase 2 - human | | | | | | |
| | | >sp\|Q15418\|KS61_HUMAN RIBOSOMAL | | | | | | |
| | | PROTEIN 56 KINASE II ALPHA 1 (EC | | | | | | |
| | | 2.7.1.-) (S6KII-ALPHA 1) (P90-RSK 1) | | | | | | |
| | | (RIBOSOMAL S6 KINASE 1) (RSK1) | | | | | | |
| | | (PP90RSK1). Length = | | | | | | |
| 464 | HBMTM61R | Rieske Fe-S protein [Homo sapiens] | gi\|488299 | 1 | 219 | 53 | 55 | HBMTM61 |
| | | Length = 274 | | | | | | |
| 465 | HWHPK71R | RIP [Homo sapiens] >pir\|I38992\|I38992 | gi\|829617 | 198 | 320 | 56 | 64 | HWHPK71 |
| | | receptor interacting protein RIP - human | | | | | | |
| | | (fragment) Length = 372 | | | | | | |
| 466 | HWBBJ39R | Sec23 protein [Homo sapiens] Length = 767 | gnl\|PID\|e236014 | 2 | 127 | 81 | 84 | HWBBJ39 |
| 467 | HSLJJ36R | selenium donor protein [Homo sapiens] | gi═1000284 | 2 | 319 | 96 | 98 | HSLJJ36 |
| | | Length = 383 | | | | | | |
| 468 | HSODD94R | selenoprotein P [Homo sapiens] Length = | gnl\|PID\|e1192260 | 2 | 232 | 61 | 70 | HSODD94 |
| | | 381 | | | | | | |
| 469 | HMIAG25R | serine kinase [Homo sapiens] | gi\|507213 | 1 | 330 | 82 | 82 | HMIAG25 |
| | | >pir\|545337\|545337 serine protein kinase | | | | | | |
| | | SRPK1 - human >sp\|Q12890\|Q12890 | | | | | | |
| | | SHRINE KINASE. Length = 655 | | | | | | |
| 470 | HWLEM94R | senile protease [Homo sapiens] Length = | gi\|2507613 | 2 | 304 | 78 | 82 | HWLEM94 |
| | | 492 | | | | | | |
| 471 | HCNDW17R | Sm protein G [Homo sapiens] | gi\|806566 | 1 | 240 | 100 | 100 | HCNDW17 |
| | | >pir\|S55054\|S55054 Sm protein G - human | | | | | | |
| | | >sp\|Q15357\|Q15357 SM PROTEIN G. | | | | | | |
| | | Length = 76 | | | | | | |
| 472 | HWLEY08R | SNAP23A protein [Homo sapiens] | gnl\|PID\|e290695 | 222 | 608 | 97 | 97 | HWLEY08 |
| | | >gnl\|PID\|e1331767 (AJ011915) | | | | | | |
| | | synaptosome associated protein of 23 | | | | | | |
| | | kilodaltons, isoform A [Homo sapiens] | | | | | | |
| | | >pir\|JC5296\|JC5296 vesicle-membrane | | | | | | |
| | | fusion protein SNAP-23A - human | | | | | | |
| | | >sp\|O00161\|O00161 VESICLE- | | | | | | |
| | | MEMBRANE FUSION PROTEIN SN | | | | | | |
| 473 | HULFN68R | sorcin CP-22 [Homo sapiens] >gi\|459836 | gi\|338482 | 2 | 409 | 88 | 91 | HULFN68 |
| | | sorcin [Homo sapiens] >pir\|552094\|552094 | | | | | | |
| | | sorcin - human >gi\|2772536 (AC003991) | | | | | | |
| | | calcium binding protein amplified in | | | | | | |
| | | mutlidrug-resistant cells [Homo sapiens] | | | | | | |
| | | {SUB 1-68} Length = 198 | | | | | | |
| 474 | HMEJD77R | SRp30c [Homo sapiens] >gnl\|PID\|e1248292 | gi\|1049078 | 3 | 263 | 46 | 48 | HMEJD77 |
| | | (AL021546) pre-mRNA splicing factor | | | | | | |
| | | SRp30c [Homo sapiens] >gi\|4099429 | | | | | | |
| | | splicing factor SRp30c [Homo sapiens] | | | | | | |
| | | >pir\|S59075\|S59075 splicing factor SRp30c | | | | | | |
| | | - human >sp\|G4099429\|G4099429 | | | | | | |
| | | SPLICING FACTOR SRP30C. Length = 22 | | | | | | |
| 475 | HS2AD15R | stimulator of TAR RNA binding [Homo | gi\|1200184 | 1 | 336 | 87 | 88 | HS2AD15 |
| | | sapiens] Length = 539 | | | | | | |
| 476 | HTEJJ32R | STM-7 [Homo sapiens] | gnl\|PID\|e206448 | 3 | 341 | 100 | 100 | HTEJJ32 |
| | | >sp\|Q92749\|Q92749 TYPE I | | | | | | |
| | | PHOSPHATIDYLINOSITOL-4- | | | | | | |
| | | PHOSPHATE 5-KINASE BETA (EC | | | | | | |
| | | 2.7.1.68) (STM-7 PROTEIN). >gi\|1743883 | | | | | | |
| | | type I phosphatidylinositol-4-phosphate 5- | | | | | | |
| | | kinase beta [Homo sapiens] {SUB 112-502} | | | | | | |
| | | >gi\|1743879 type I phosphatidylinosi | | | | | | |
| 477 | HETIF46R | sulfate transporter [Homo sapiens] | gi\|549988 | 1 | 228 | 71 | 71 | HETIF46 |
| | | >sp\|P50443\|DTD_HUMAN SULFATE | | | | | | |
| | | TRANSPORTER (DIASTROPHIC | | | | | | |
| | | DYSPLASIA PROTEIN). Length = 739 | | | | | | |
| 478 | H2CBS58R | thrombospondin 2 [Homo sapiens] | gi\|307506 | 3 | 455 | 96 | 97 | H2CB558 |
| | | >pir\|A47379\|TSHUP2 thrombospondin 2 | | | | | | |
| | | precursor - human Length = 1172 | | | | | | |
| 479 | H2LAB77R | thymosin beta-4 precursor [Rattus | gi\|207318 | 98 | 265 | 100 | 100 | H2LAB77 |
| | | norvegicus] >pir\|I52084\|I52084 thymosin | | | | | | |
| | | beta-4 precursor - rat (fragment) >gi\|339689 | | | | | | |
| | | thymosin beta-4 [Homo sapiens] {SUB 13- | | | | | | |
| | | 56} >pir\|A01521\|TNBOB4 thymosin beta-4 | | | | | | |
| | | - bovine {SUB 14-56} >gi\|825683 open | | | | | | |
| | | reading frame [Homo s | | | | | | |
| 480 | HODAJ23R | tissue-specific secretory protein | gi\|583141 | 2 | 223 | 62 | 62 | HODAJ23 |
| | | [unidentified] >gi\|32051 HE4 protein | | | | | | |
| | | [Homo sapiens] >pir\|525454\|525454 HE4 | | | | | | |
| | | protein - human >sp\|Q14508\|EP4_HUMAN | | | | | | |
| | | MAJOR EPIDIDYMIS-SPECIFIC | | | | | | |
| | | PROTEIN E4 PRECURSOR (HE4) | | | | | | |
| | | (EPIDIDYMAL SECRETORY PROTEIN | | | | | | |
| | | E4). Length = 125 | | | | | | |
| 481 | HWAFP88R | TRANSCRIPTION FACTOR BTF3 (RNA | sp\|Q64152\|BTF3_{—} | 85 | 471 | 92 | 93 | HWAFP88 |
| | | POLYMERASE B TRANSCRIPTION | MOUSE | | | | | |
| | | FACTOR 3). Length = 204 | | | | | | |
| 482 | HIDTHI51R | transcription factor-like protein 4 - human | pir\|JC5333\|JC5333 | 2 | 565 | 82 | 86 | HDTHI51 |
| | | Length = 298 | | | | | | |
| 483 | HWMEB67R | tryptase-III [Homo sapiens] | gi\|339985 | 21 | 218 | 92 | 92 | HWMEB67 |
| | | >sp\|Q15664\|Q15664 TRYPTASE-III | | | | | | |
| | | (FRAGMENT). Length = 267 | | | | | | |
| 484 | HTXOU93R | tumor susceptibility protein [Homo sapiens] | gi\|3184258 | 2 | 439 | 100 | 100 | HTXOU93 |
| | | >sp\|Q99816\|Q99816 TUMOR | | | | | | |
| | | SUSCEPTIBILITY PROTEIN. Length = | | | | | | |
| | | 390 | | | | | | |
| 485 | HANKB37R | ubiquitin [Plasmodium falciparum] | gi\|552237 | 11 | 115 | 70 | 73 | HANKB37 |
| | | >sp\|Q26029\|Q26029 UBIQUITIN. Length = | | | | | | |
| | | 77 | | | | | | |
| 486 | HWLHN38R | ubiquitin-conjugating enzyme [Mus | gnl\|PID\|e1311091 | 129 | 347 | 77 | 83 | HWLHN38 |
| | | musculus] >sp\|O88738\|O88738 | | | | | | |
| | | UBIQUITIN-CONJUGATING ENZYME. | | | | | | |
| | | Length = 4845 | | | | | | |
| 487 | HOSDZ35R | UDP-Ga1NAc:polypeptide | N-gnl\|PID\|e209711 | 2 | 286 | 85 | 85 | HOSDZ35 |
| | | acetylgalactosaminyltransferas [Homo | | | | | | |
| | | sapiens] >sp\|Q14435\|Q14435 | | | | | | |
| | | POLYPEPTIDE N- | | | | | | |
| | | ACETYLGALACTOSAMINYLTRANSFE | | | | | | |
| | | RASE (EC 2.4.1.41) (PROTEIN-UDP | | | | | | |
| | | ACETYLGALACTOSAMINYLTRANSFE | | | | | | |
| | | RASE) (UDP-GALNAC:POLYPEPTIDE, | | | | | | |
| | | N- | | | | | | |
| | | ACETYLGALACTOSAMINYLTRANSFE | | | | | | |
| | | RASE) | | | | | | |
| 488 | HKMAA52R | UDP-glucuronosyltransferase [Homo | gi\|624725 | 3 | 284 | 98 | 98 | HKMAA52 |
| | | sapiens] >pir\|A31340\|A31340 | | | | | | |
| | | glucuronosyltransferase (EC 2.4.1.17) | | | | | | |
| | | UGT1A1 precursor - human | | | | | | |
| | | >sp\|G245274\|G245274 PHENOL | | | | | | |
| | | TRANSFERASE = UGT1F PRODUCT. | | | | | | |
| | | {SUB 1-286} >gi\|2645491 (AF014112) | | | | | | |
| | | phenol UDP-glucuronosyltransferase [Homo | | | | | | |
| 489 | H2LAB37R | | | 93 | 290 | | | H2LAB37 |
| 490 | H2LAP46R | | | 206 | 568 | | | H2LAP46 |
| 491 | H6BSE61R | | | 67 | 369 | | | H6BSE61 |
| 492 | H6EEE76R | | | 149 | 277 | | | H6EEE76 |
| 493 | H6EEV26R | | | 2 | 88 | | | H6EEV26 |
| 494 | HABAE88R | | | 40 | 216 | | | HABAE88 |
| 495 | HABGD41R | | | 1 | 147 | | | HABGD41 |
| 496 | HACBS75R | | | 5 | 187 | | | HACBS75 |
| 497 | HACCA48R | | | 5 | 91 | | | HACCA48 |
| 498 | HACCS19R | | | 3 | 341 | | | HACCS19 |
| 499 | HADAB25R | | | 1 | 261 | | | HADAB25 |
| 500 | HAGGL96R | | | 3 | 347 | | | HAGGL96 |
| 501 | HAGGT37R | | | 3 | 113 | | | HAGGT37 |
| 502 | HAHDR66R | | | 27 | 347 | | | HAHDR66 |
| 503 | HAJCC53R | | | 164 | 418 | | | HAJCC53 |
| 504 | HAJCL80R | | | 3 | 122 | | | HAJCL80 |
| 505 | HANKF43R | | | 372 | 566 | | | HANKE43 |
| 506 | HAPCM11R | | | 69 | 152 | | | HAPCM11 |
| 507 | HAPNT66R | | | 1 | 66 | | | HAPNT66 |
| 508 | HAQAG47R | | | 2 | 148 | | | HAQAG47 |
| 509 | HAQBWS8R | | | 3 | 260 | | | HAQBW58 |
| 510 | HAQMH45R | | | 91 | 363 | | | HAQMH45 |
| 511 | HAQMI94R | | | 1 | 183 | | | HAQMI94 |
| 512 | HARNC74R | | | 84 | 272 | | | HARNC74 |
| 513 | HATBA87R | | | 98 | 202 | | | HATBA87 |
| 514 | HATBG77R | | | 174 | 392 | | | HATBG77 |
| 515 | HBAGQ79R | | | 1 | 231 | | | HBAGQ79 |
| 516 | HBCAN64R | | | 2 | 82 | | | HBCAN64 |
| 517 | HBGCA44R | | | 1 | 123 | | | HBGCA44 |
| 518 | HBGFX27R | | | 3 | 281 | | | HBGFX27 |
| 519 | HBGMU38R | | | 40 | 429 | | | HBGMU38 |
| 520 | HBJBO10R | | | 1 | 93 | | | HBJBO10 |
| 521 | HBJCCS3R | | | 2 | 106 | | | HBJCC53 |
| 522 | HBJEDS5R | | | 1 | 252 | | | HBJED55 |
| 523 | HBJGR39R | | | 2 | 106 | | | HBJGR39 |
| 524 | HBJLU30R | | | 39 | 344 | | | HBJLU30 |
| 525 | HBKEC78R | | | 93 | 245 | | | HBKEC78 |
| 526 | HBMST81R | | | 1 | 192 | | | HBMST81 |
| 527 | HBMTJ51R | | | 150 | 323 | | | HBMTJ51 |
| 528 | HBMWF72R | | | 1 | 111 | | | HBMWE72 |
| 529 | HBWBD78R | | | 2 | 226 | | | HBWBD78 |
| 530 | HBXCU02R | | | 2 | 79 | | | HBXCU02 |
| 531 | HCDAK65R | | | 1 | 138 | | | HCDAK65 |
| 532 | HCDBM08R | | | 130 | 339 | | | HCDBM08 |
| 533 | HCDCP10R | | | 72 | 206 | | | HCDCP10 |
| 534 | HCDDQ63R | | | 3 | 116 | | | HCDDQ63 |
| 535 | HCEEH05R | | | 204 | 380 | | | HCEEH05 |
| 536 | HCEIQ92R | | | 1 | 90 | | | HCEIQ92 |
| 537 | HCFCD01R | | | 28 | 228 | | | HCFCD01 |
| 538 | HCFCR43R | | | 64 | 360 | | | HCFCR43 |
| 539 | HCFLT83R | | | 3 | 104 | | | HCFLT83 |
| 540 | HCHAO92R | | | 193 | 342 | | | HCHA092 |
| 541 | HCHOH49R | | | 183 | 344 | | | HCHOH49 |
| 542 | HCHPG05R | | | 365 | 616 | | | HCHPG05 |
| 543 | HCIAD24R | | | 98 | 301 | | | HCIAD24 |
| 544 | HCNCA90R | | | 380 | 532 | | | HCNCA90 |
| 545 | HCNCN80R | | | 120 | 353 | | | HCNCN80 |
| 546 | HCNCY51R | | | 184 | 267 | | | HCNCY51 |
| 547 | HCNCY63R | | | 1 | 81 | | | HCNCY63 |
| 548 | HCNDO71R | | | 1 | 213 | | | HCNDO71 |
| 549 | HCNDV83R | | | 64 | 303 | | | HCNDV83 |
| 550 | HCNUB26R | | | 119 | 289 | | | HCNUB26 |
| 551 | HCQBN22R | | | 2 | 94 | | | HCQBN22 |
| 552 | HCQCL27R | | | 116 | 235 | | | HCQCL27 |
| 553 | HCQCL48R | | | 57 | 251 | | | HCQCL48 |
| 554 | HCQCL96R | | | 287 | 430 | | | HCQCL96 |
| 555 | HCQDC74R | | | 145 | 360 | | | HCQDC74 |
| 556 | HCQDH94R | | | 20 | 76 | | | HCQDH94 |
| 557 | HCQDJ42R | | | 149 | 388 | | | HCQDJ42 |
| 558 | HCRMD77R | | | 3 | 185 | | | HCRMD77 |
| 559 | HCRME02R | | | 3 | 293 | | | HCRME02 |
| 560 | HCRMX88R | | | 3 | 284 | | | HCRMX88 |
| 561 | HCRNA70R | | | 40 | 204 | | | HCRNA70 |
| 562 | HCRNP66R | | | 3 | 431 | | | HCRNP66 |
| 563 | HCRNX32R | | | 2 | 196 | | | HCRNX32 |
| 564 | HCROH25R | | | 3 | 128 | | | HCROH25 |
| 565 | HCROJ05R | | | 66 | 170 | | | HCROJ05 |
| 566 | HCROJ68R | | | 3 | 239 | | | HCROJ68 |
| 567 | HCROK68R | | | 2 | 208 | | | HCROK68 |
| 568 | HCROK94R | | | 1 | 210 | | | HCROK94 |
| 569 | HCROM30R | | | 3 | 365 | | | HCROM30 |
| 570 | HCROQ34R | | | 29 | 136 | | | HCROQ34 |
| 571 | HCROQS4R | | | 3 | 98 | | | HCROQ54 |
| 572 | HCROZ66R | | | 239 | 427 | | | HCROZ66 |
| 573 | HCRPC61R | | | 3 | 194 | | | HCRPC61 |
| 574 | HCRPG28R | | | 95 | 229 | | | HCRPG28 |
| 575 | HCRPL80R | | | 59 | 235 | | | HCRPL80 |
| 576 | HCRPN52R | | | 3 | 191 | | | HCRPN52 |
| 577 | HCRPS40R | | | 208 | 321 | | | HCRPS40 |
| 578 | HCRPV74R | | | 179 | 409 | | | HCRPV74 |
| 579 | HCRQC89R | | | 2 | 85 | | | HCRQC89 |
| 580 | HCWDS78R | | | 322 | 558 | | | HCWDS78 |
| 581 | HDCAA21R | | | 1 | 120 | | | HDCAA21 |
| 582 | HDDAA85R | | | 139 | 258 | | | HDDAA85 |
| 583 | HDPGO03R | | | 110 | 352 | | | HDPGO03 |
| 584 | HDPLB08R | | | 142 | 360 | | | HDPLB08 |
| 585 | HDQDB15R | | | 220 | 417 | | | HDQDB15 |
| 586 | HDQEX80R | | | 274 | 492 | | | HDQEX80 |
| 587 | HDRMI91R | | | 3 | 116 | | | HDRMI91 |
| 588 | HDTJO85R | | | 36 | 197 | | | HDTJO85 |
| 589 | HDTMJ22R | | | 192 | 608 | | | HTTMJ22 |
| 590 | HE6CS28R | | | 40 | 213 | | | HE6CS28 |
| 591 | HE6DJ45R | | | 2 | 64 | | | HE6DJ45 |
| 592 | HE7TJ40R | | | 62 | 268 | | | HE7TJ40 |
| 593 | HB9FH12R | | | 182 | 307 | | | HE9FH12 |
| 594 | HE9HJ57R | | | 3 | 74 | | | HE9HJ57 |
| 595 | HE9QH08R | | | 360 | 596 | | | HE9QH08 |
| 596 | HE9TC50R | | | 198 | 425 | | | HE9TC50 |
| 597 | HEAAL59R | | | 1 | 150 | | | HEAAL59 |
| 598 | HEGAR32R | | | 448 | 675 | | | HEGAR32 |
| 599 | HEGAR85R | | | 361 | 534 | | | HEGAR85 |
| 600 | HELFE05R | | | 32 | 187 | | | HELFE05 |
| 601 | HEMFI88R | | | 2 | 343 | | | HEMFI88 |
| 602 | HEMFR18R | | | 83 | 397 | | | HEMFR18 |
| 603 | HEONL43R | | | 2 | 76 | | | HEONL43 |
| 604 | HESAC53R | | | 3 | 116 | | | HESAC53 |
| 605 | HETJB05R | | | 1 | 138 | | | HETJB05 |
| 606 | HETJC36R | | | 1 | 102 | | | HETJC36 |
| 607 | HFADM62R | | | 1 | 78 | | | HFADM62 |
| 608 | HFATE31R | | | 2 | 361 | | | HEATE31 |
| 609 | HFATZ30R | | | 3 | 152 | | | HPATZ30 |
| 610 | HFCEL77R | | | 3 | 278 | | | HECEL77 |
| 611 | HFEBN43R | | | 174 | 491 | | | HFEBN43 |
| 612 | HFGAF10R | | | 272 | 469 | | | HFGAF10 |
| 613 | HFIEC01R | | | 1 | 144 | | | HETEC01 |
| 614 | HFIIR75R | | | 317 | 427 | | | HFIIR75 |
| 615 | HEIUB90R | | | 2 | 124 | | | HFUJB90 |
| 616 | HFIUM71R | | | 37 | 159 | | | HFIUM71 |
| 617 | HFOXL53R | | | 1 | 117 | | | HFOXL53 |
| 618 | HFPBO66R | | | 196 | 408 | | | HFPBO66 |
| 619 | HFTBI57R | | | 47 | 220 | | | HFTBI57 |
| 620 | HFTCC22R | | | 1 | 126 | | | HIFTCC22 |
| 621 | HFXGX46R | | | 1 | 114 | | | HFXGX46 |
| 622 | HGAME72R | | | 2 | 199 | | | HGAME72 |
| 623 | HGBCS53R | | | 142 | 279 | | | HGBCS53 |
| 624 | HGBHP81R | | | 87 | 221 | | | HGBHP81 |
| 625 | HGCOX03R | | | 323 | 511 | | | HGCOX03 |
| 626 | HHBES92R | | | 349 | 483 | | | HHBES92 |
| 627 | HHBEW72R | | | 13 | 219 | | | HHBEW72 |
| 628 | HHERT59R | | | 2 | 88 | | | HHERT59 |
| 629 | HHMMD64R | | | 31 | 252 | | | HHMMD64 |
| 630 | HHSGT13R | | | 428 | 619 | | | HHSGT13 |
| 631 | HISED82R | | | 1 | 126 | | | HISED82 |
| 632 | HJMAH76R | | | 2 | 253 | | | HJMAH76 |
| 633 | HJMAN56R | | | 1 | 180 | | | HJMAN56 |
| 634 | HJMAO54R | | | 1 | 291 | | | HJMAO54 |
| 635 | HKDAD56R | | | 2 | 109 | | | HKDAD56 |
| 636 | HKLSD93R | | | 89 | 298 | | | HKLSD93 |
| 637 | HLMEH16R | | | 1 | 447 | | | HLMFH16 |
| 638 | HLQBD52R | | | 1 | 195 | | | HLQBD52 |
| 639 | HLQCQ73R | | | 3 | 350 | | | HLQCQ73 |
| 640 | HLQEF47R | | | 348 | 503 | | | HLQEF47 |
| 641 | HLQFM50R | | | 136 | 291 | | | HLQFM50 |
| 642 | HLQFY61R | | | 411 | 575 | | | HLQFY61 |
| 643 | HLQGA76R | | | 210 | 404 | | | HLQGA76 |
| 644 | HLQGE53R | | | 1 | 66 | | | HLQGE53 |
| 645 | HLTEV09R | | | 210 | 371 | | | HLTEV09 |
| 646 | HLXNE63R | | | 142 | 258 | | | HLXNE63 |
| 647 | HLXTF64R | | | 2 | 136 | | | HLXTF64 |
| 648 | HMACF85R | | | 23 | 430 | | | HMACF85 |
| 649 | HMAIA15R | | | 108 | 452 | | | HMAIA15 |
| 650 | HMCHZ07R | | | 247 | 402 | | | HMCHZ07 |
| 651 | HMCIS54R | | | 84 | 242 | | | HMCIS54 |
| 652 | HMSFW88R | | | 1 | 69 | | | HMSFW88 |
| 653 | HMSMW71R | | | 290 | 514 | | | HMSMW71 |
| 654 | HNHMR05R | | | 77 | 598 | | | HNHMR05 |
| 655 | HNJBB78R | | | 91 | 282 | | | HNJBB78 |
| 656 | HNTMA96R | | | 3 | 362 | | | HNTMA96 |
| 657 | HNTRL32R | | | 130 | 291 | | | HNTRL32 |
| 658 | HNTST76R | | | 2 | 397 | | | HNTST76 |
| 659 | HOCNC55R | | | 67 | 156 | | | HOCNC55 |
| 660 | HOCND06R | | | 147 | 275 | | | HOCND06 |
| 661 | HOCND49R | | | 133 | 273 | | | HOCND49 |
| 662 | HODEH30R | | | 2 | 154 | | | HODEH30 |
| 663 | HODFA26R | | | 263 | 550 | | | HODFA26 |
| 664 | HODHL89R | | | 106 | 279 | | | HODHL89 |
| 665 | HOEJM67R | | | 2 | 364 | | | HOEJM67 |
| 666 | HOGBN48R | | | 147 | 380 | | | HOGBN48 |
| 667 | HOHCX95R | | | 2 | 364 | | | HOHCX95 |
| 668 | HORBP43R | | | 3 | 365 | | | HORBP43 |
| 669 | HOUHN53R | | | 235 | 345 | | | HOUHN53 |
| 670 | HOUIE10R | | | 72 | 254 | | | HOULE10 |
| 671 | HPBEE63R | | | 107 | 211 | | | HPBEE63 |
| 672 | HPEBO20R | | | 1 | 237 | | | HPEBO20 |
| 673 | HPJBE91R | | | 1 | 312 | | | HPJBE91 |
| 674 | HPTRW82R | | | 32 | 133 | | | HPTRW82 |
| 675 | HPWDC51R | | | 33 | 272 | | | HPWDC51 |
| 676 | HPWDK52R | | | 1 | 330 | | | HPWDK52 |
| 677 | HRDBJ82R | | | 2 | 334 | | | HRDBJ82 |
| 678 | HRODH93R | | | 2 | 121 | | | HRODH93 |
| 679 | HS2AD53R | | | 1 | 120 | | | HS2AD53 |
| 680 | HSATR92R | | | 3 | 203 | | | HSATR92 |
| 681 | HSDZG83R | | | 5 | 136 | | | HSDZG83 |
| 682 | HSICQ60R | | | 2 | 118 | | | HSICQ60 |
| 683 | HSIFA64R | | | 3 | 449 | | | HSIFA64 |
| 684 | HSKNN36R | | | 108 | 527 | | | HSKNN36 |
| 685 | HSKYE52R | | | 2 | 124 | | | HSKYE52 |
| 686 | HSLJA55R | | | 2 | 169 | | | HSLJA55 |
| 687 | HSODA95R | | | 2 | 169 | | | HSODA95 |
| 688 | HSPBS19R | | | 1 | 372 | | | HSPBS19 |
| 689 | HSSGK43R | | | 3 | 155 | | | HSSGK43 |
| 690 | HSXFJ91R | | | 3 | 242 | | | HSXFJ91 |
| 691 | HTEMB57R | | | 168 | 410 | | | HTEMB57 |
| 692 | HTGBR05R | | | 37 | 138 | | | HTGBR05 |
| 693 | HTLGA72R | | | 3 | 455 | | | HTLGA72 |
| 694 | HTLIX61R | | | 1 | 102 | | | HTLIX61 |
| 695 | HTNTF25R | | | 307 | 426 | | | HTNTF25 |
| 696 | HTWCP79R | | | 91 | 180 | | | HTWCP79 |
| 697 | HTXFA64R | | | 3 | 263 | | | HTXFA64 |
| 698 | HUSJF91R | | | 218 | 412 | | | HUSJF91 |
| 699 | HUSJN48R | | | 259 | 462 | | | HUSJN48 |
| 700 | HUSJX68R | | | 98 | 493 | | | HUSJX68 |
| 701 | HUSZN23R | | | 36 | 131 | | | HUSZN23 |
| 702 | HUTSD20R | | | 104 | 256 | | | HUTSD20 |
| 703 | HWACH10R | | | 66 | 275 | | | HWACH10 |
| 704 | HWAFI63R | | | 3 | 272 | | | HWAFJ63 |
| 705 | HWAGZ89R | | | 176 | 385 | | | HWAGZ89 |
| 706 | HWBAQ20R | | | 1 | 177 | | | HWBAQ20 |
| 707 | HWHHM83R | | | 2 | 298 | | | HWHHM83 |
| 708 | HWLAC24R | | | 11 | 133 | | | HWLAC24 |
| 709 | HWLAC81R | | | 64 | 360 | | | HWLAC81 |
| 710 | HWLBF27R | | | 3 | 149 | | | HWLBF27 |
| 711 | HWLBS90R | | | 195 | 347 | | | HWLBS90 |
| 712 | HWLCU10R | | | 55 | 120 | | | HWLCU10 |
| 713 | HWLEH13R | | | 2 | 379 | | | IJWLEH13 |
| 714 | HWLEJ67R | | | 375 | 527 | | | HWLEJ67 |
| 715 | HWLEM49R | | | 244 | 354 | | | HWLEM49 |
| 716 | HWLFP27R | | | 2 | 79 | | | HWLFP27 |
| 717 | HWLGG20R | | | 92 | 208 | | | HWLGG20 |
| 718 | HWLGK22R | | | 209 | 373 | | | HWLGK22 |
| 719 | HWLGM21R | | | 244 | 354 | | | HWLGM21 |
| 720 | HWLGP37R | | | 8 | 181 | | | HWLGP37 |
| 721 | HWLGS46R | | | 40 | 324 | | | HWLGS46 |
| 722 | HWLGU40R | | | 2 | 202 | | | HWLGU40 |
| 723 | HWLGX65R | | | 3 | 230 | | | HWLGX65 |
| 724 | HWLHD09R | | | 2 | 310 | | | HWLHD09 |
| 725 | HWLHD50R | | | 3 | 98 | | | HWLHD50 |
| 726 | HWLHM40R | | | 2 | 208 | | | HWLHM40 |
| 727 | HWLHW89R | | | 56 | 382 | | | HWLHW89 |
| 728 | HWLID17R | | | 64 | 276 | | | HWLID17 |
| 729 | HWLIM20R | | | 3 | 158 | | | HWLHM20 |
| 730 | HWLJA26R | | | 34 | 135 | | | HWLJA26 |
| 731 | HWLJA28R | | | 1 | 108 | | | HWLJA28 |
| 732 | HWLJG57R | | | 240 | 404 | | | HWLJG57 |
| 733 | HWLJL19R | | | 119 | 292 | | | HWLJL19 |
| 734 | HWLJP50R | | | 1 | 147 | | | HWLJP50 |
| 735 | HWLKG82R | | | 1 | 360 | | | HWLKG82 |
| 736 | HWLKG95R | | | 1 | 300 | | | HWLKG95 |
| 737 | HWLKI53R | | | 1 | 144 | | | HWLKI53 |
| 738 | HWLKM09R | | | 2 | 100 | | | HWLKM09 |
| 739 | HWLKM86R | | | 44 | 226 | | | HWLKM86 |
| 740 | HWLKM95R | | | 2 | 184 | | | HWLKM95 |
| 741 | HWLKU25R | | | 3 | 137 | | | HWLKU25 |
| 742 | HWLQS83R | | | 1 | 117 | | | HWLQS83 |
| 743 | HWLQU65R | | | 361 | 558 | | | HWLQU65 |
| 744 | HWLRL59R | | | 1 | 225 | | | HWLRL59 |
| 745 | HWLRP86R | | | 2 | 253 | | | HWLRP86 |
| 746 | HWLRQ49R | | | 3 | 158 | | | HWLRQ49 |
| 747 | HWLUE60R | | | 84 | 218 | | | HWLUF60 |
| 748 | HWLUI37R | | | 51 | 263 | | | HWLUI37 |
| 749 | HWLUR41R | | | 33 | 155 | | | HWLUR41 |
| 750 | HWLVD60R | | | 1 | 174 | | | HWLVD60 |
| 751 | HWLVV50R | | | 1 | 72 | | | HWLVV50 |
| 752 | HWMAN61R | | | 3 | 107 | | | HWMAN61 |
| 753 | HWMEB47R | | | 87 | 185 | | | HWMEB47 |
| 754 | HWMEH13R | | | 2 | 256 | | | HWMEH13 |
| 755 | HWMEH26R | | | 168 | 341 | | | HWMEH26 |
| 756 | HWMEL50R | | | 131 | 400 | | | HWMEL50 |
| 757 | HWMFB31R | | | 100 | 285 | | | HWMFB31 |
| 758 | HWMFL66R | | | 61 | 153 | | | HWMFL66 |
| 759 | HWMFO93R | | | 2 | 79 | | | HWMFO93 |
| 760 | HWMFP01R | | | 120 | 284 | | | HWMFP01 |
| 761 | HZAAD81R | | | 1 | 144 | | | HZAAD81 |
| 762 | HWLHN70R | | | 2 | 160 | | | HWLHN70 |
| 763 | HFIXK57R | URF3 (NADH dehydrogenase subunit) | gi\|13011 | 2 | 211 | 90 | 97 | HFIXK57 |
| | | [Homo sapiens] >gi\|506832 protein 3 | | | | | | |
| | | [Homo sapiens] >pir\|A00422\|DNHUN3 | | | | | | |
| | | NADH dehydrogenase (ubiquinone) (EC | | | | | | |
| | | 1.6.5.3) chain 3 - human mitochondrion | | | | | | |
| | | (SGC1) >sp\|P03897\|NU3M_HUMAN | | | | | | |
| | | NADH-UBIQUINONE | | | | | | |
| | | OXIDOREDUCTASE CHAIN 3 (EC 1.6 | | | | | | |
| 764 | HMAFE48R | URF3 (NADH dehydrogenase subunit) | gi\|13011 | 47 | 205 | 90 | 100 | HMAFE48 |
| | | [Homo sapiens] >gi\|506832 protein 3 | | | | | | |
| | | [Homo sapiens] >pir\|A00422\|DNHUN3 | | | | | | |
| | | NADH dehydrogenase (ubiquinone) (EC | | | | | | |
| | | 1.6.5.3) chain 3 - human mitochondrion | | | | | | |
| | | (SGC1) >sp\|P03897\|NU3M_HUMAN | | | | | | |
| | | NADH-UBIQUINONE | | | | | | |
| | | OXIDOREDUCTASE CHAIN 3 (EC 1.6 | | | | | | |
| 765 | HRODJ88R | URF3 (NADH dehydrogenase subunit) | gi\|13011 | 55 | 213 | 83 | 94 | HRODJ88 |
| | | [Homo sapiens] >gi\|506832 protein 3 | | | | | | |
| | | [Homo sapiens] >pir\|A00422\|DNHUN3 | | | | | | |
| | | NADH dehydrogenase (ubiquinone) (EC | | | | | | |
| | | 1.6.5.3) chain 3 - human mitochondrion | | | | | | |
| | | (SGC1) >sp\|P03897\|NU3M_HUMAN | | | | | | |
| | | NADH-UBIQUINONE | | | | | | |
| | | OXIDOREDUCTASE CHAIN 3 (EC 1.6 | | | | | | |
| 766 | HWLAR31R | URF3 (NADH dehydrogenase subunit) | gi\|13011 | 56 | 214 | 91 | 100 | HWLAR31 |
| | | [Homo sapiens] >gi\|506832 protein 3 | | | | | | |
| | | [Homo sapiens] >pir\|A00422\|DNHUN3 | | | | | | |
| | | NADH dehydrogenase (ubiquinone) (EC | | | | | | |
| | | 1.6.5.3) chain 3 - human mitochondrion | | | | | | |
| | | (SGC1) >sp\|P03897\|NU3M_HUMAN | | | | | | |
| | | NADH-UBIQUINONE | | | | | | |
| | | OXIDOREDUCTASE CHAIN 3 (EC 1.6 | | | | | | |
| 767 | HNHLH26R | v-SNARE [Cricetulus griseus] | gi\|1912453 | 73 | 243 | 64 | 76 | HNHLH26 |
| | | >sp\|O08522\|O008522 V-SNARE. Length = | | | | | | |
| | | 250 | | | | | | |
| 768 | H2LAU24R | weakly similar to gastrula zinc finger protein | gi\|746495 | 78 | 488 | 45 | 60 | H2LAU24 |
| | | [Caenorhabditis elegans] | | | | | | |
| | | >sp\|Q09998\|Q09998 PUTATIVE 55.5 KD | | | | | | |
| | | ZINC FINGER PROTEIN R144.3 IN | | | | | | |
| | | CHROMOSOME III. Length = 492 | | | | | | |
| 769 | HATDR94R | X box binding protein-1 [Homo sapiens] | gi\|306893 | 2 | 367 | 95 | 100 | HATDR94 |
| | | >pir\|A36299\|A36299 transcription factor | | | | | | |
| | | hXBP-1 - human Length = 260 | | | | | | |
| 770 | HWLLI85R | X-linked deafness dystonia protein [Homo | gi\|3123843 | 410 | 580 | 60 | 80 | HWLLI85 |
| | | sapiens] >sp\|O60220\|O60220 X-LINKED | | | | | | |
| | | DEAFNESS DYSTONIA PROTEIN. | | | | | | |
| | | Length = 97 | | | | | | |
| 771 | HBHMF67R | XP-C repair complementing protein | gnl\|PID\|d1005181 | 3 | 191 | 96 | 96 | HBHMF67 |
| | | (p58/HHR23B) [Homo sapiens] | | | | | | |
| | | >pir\|S44346\|S44346 RAD23 protein | | | | | | |
| | | homolog - human Length = 409 | | | | | | |
| 772 | HSYCH41R | yeast methionyl-tRNA synthetase homolog | gnl\|PID\|e218477 | 2 | 373 | 90 | 90 | HSYCH41 |
| | | [Homo sapiens] >pir\|JC5224\|JC5224 | | | | | | |
| | | methionine--tRNA ligase (EC 6.1.1.10) - | | | | | | |
| | | human >gi\|804996 mitoxantrone-resistance | | | | | | |
| | | associated gene [Homo sapiens] {SUB 423- | | | | | | |
| | | 900} Length = 900 | | | | | | |
| 773 | HWLJR53R | zinc finger protein PZF [Mus musculus] | gi\|453376 | 1 | 552 | 81 | 83 | HWLJR53 |
| | | >pir\|I48724\|I48724 zinc finger protein PZF - | | | | | | |
| | | mouse >sp\|Q62511\|Q62511 ZINC FINGER | | | | | | |
| | | PROTEIN PZF. Length = 455 | | | | | | |

[0040] The first column of Table 1 shows the “SEQ ID NO:” for each of the 773 colorectal cancer antigen polynucleotide sequences of the invention.

[0041] The second column in Table 1, provides a unique “Sequence/Contig ID” identification for each colorectal and/or colorectal cancer associated sequence. The third column in Table 1, “Gene Name,” provides a putative identification of the gene based on the sequence similarity of its translation product to an amino acid sequence found in a publicly accessible gene database, such as GenBank (NCBI). The great majority of the cDNA sequences reported in Table 1 are unrelated to any sequences previously described in the literature. The fourth column, in Table 1, “Overlap,” provides the database accession no. for the database sequence having similarity. The fifth and sixth columns in Table 1 provide the location (nucleotide position nos. within the contig), “Start” and “End”, in the polynucleotide sequence “SEQ ID NO:X” that delineate the preferred ORF shown in the sequence listing as SEQ ID NO:Y. In one embodiment, the invention provides a protein comprising, or alternatively consisting of, a polypeptide encoded by the portion of SEQ ID NO:X delineated by the nucleotide position nos. “Start” and “End”. Also provided are polynucleotides encoding such proteins and the complementary strand thereto. The seventh and eighth columns provide the “% Id” (percent identity) and “% Si” (percent similarity) observed between the aligned sequence segments of the translation product of SEQ ID NO:X and the database sequence.

[0042] The ninth column of Table 1 provides a unique “Clone ID” for a clone related to each contig sequence. This clone ID references the cDNA clone which contains at least the 5′ most sequence of the assembled contig and at least a portion of SEQ ID NO:X was determined by directly sequencing the referenced clone. The reference clone may have more sequence than described in the sequence listing or the clone may have less. In the vast majority of cases, however, the clone is believed to encode a full-length polypeptide. In the case where a clone is not full-length, a full-length cDNA can be obtained by methods described elsewhere herein.

[0043] Table 3 indicates public ESTs, of which at least one, two, three, four, five, ten, or more of any one or more of these public ESTs are optionally excluded from the invention.

[0044] SEQ ID NO:X (where X may be any of the polynucleotide sequences disclosed in the sequence listing as SEQ ID NO:1 through SEQ ID NO:773) and the translated SEQ ID NO:Y (where Y may be any of the polypeptide sequences disclosed in the sequence listing as SEQ ID NO:774 through SEQ ID NO:1546) are sufficiently accurate and otherwise suitable for a variety of uses well known in the art and described further below. For instance, SEQ ID NO:X has uses including, but not limited to, in designing nucleic acid hybridization probes that will detect nucleic acid sequences contained in SEQ ID NO:X or the related cDNA clone contained in a library deposited with the ATCC. These probes will also hybridize to nucleic acid molecules in biological samples, thereby enabling immediate applications in chromosome mapping, linkage analysis, tissue identification and/or typing, and a variety of forensic and diagnostic methods of the invention. Similarly, polypeptides identified from SEQ ID NO:Y have uses that include, but are not limited to, generating antibodies which bind specifically to the colorectal cancer antigen polypeptides, or fragments thereof, and/or to the colorectal cancer antigen polypeptides encoded by the cDNA clones identified in Table 1.

[0045] Nevertheless, DNA sequences generated by sequencing reactions can contain sequencing errors. The errors exist as misidentified nucleotides, or as insertions or deletions of nucleotides in the generated DNA sequence. The erroneously inserted or deleted nucleotides cause frame shifts in the reading frames of the predicted amino acid sequence. In these cases, the predicted amino acid sequence diverges from the actual amino acid sequence, even though the generated DNA sequence may be greater than 99.9% identical to the actual DNA sequence (for example, one base insertion or deletion in an open reading frame of over 1000 bases).

[0046] Accordingly, for those applications requiring precision in the nucleotide sequence or the amino acid sequence, the present invention provides not only the generated nucleotide sequence identified as SEQ ID NO:X, the predicted translated amino acid sequence identified as SEQ ID NO:Y, but also a sample of plasmid DNA containing the related cDNA clone (deposited with the ATCC, as set forth in Table 1). The nucleotide sequence of each deposited clone can readily be determined by sequencing the deposited clone in accordance with known methods. Further, techniques known in the art can be used to verify the nucleotide sequences of SEQ ID NO:X.

[0047] The predicted amino acid sequence can then be verified from such deposits. Moreover, the amino acid sequence of the protein encoded by a particular clone can also be directly determined by peptide sequencing or by expressing the protein in a suitable host cell containing the deposited human cDNA, collecting the protein, and determining its sequence.

[0048] The present invention also relates to vectors or plasmids which include such DNA sequences, as well as the use of the DNA sequences. The material deposited with the ATCC on:

TABLE 2

| ATCC Deposits | Deposit Date | ATCC Designation Number |
|---|---|---|
| LP01, LP02, LP03, LP04, | May-20-97 | 209059, 209060, 209061, |
| LP05, LP06, LP07, LP08, | | 209062, 209063, 209064, |
| LP09, LP10, LP11, | | 209065, 209066, 209067, |
| | | 209068, 209069 |
| LP12 | Jan-12-98 | 209579 |
| LP13 | Jan-12-98 | 209578 |
| LP14 | Jul-16-98 | 203067 |
| LP15 | Jul-16-98 | 203068 |
| LP16 | Feb-1-99 | 203609 |
| LP17 | Feb-1-99 | 203610 |
| LP20 | Nov-17-98 | 203485 |
| LP21 | Jun-18-99 | PTA-252 |
| LP22 | Jun-18-99 | PTA-253 |
| LP23 | Dec-22-99 | PTA-1081 |

[0049] each is a mixture of cDNA clones derived from a variety of human tissue and cloned in either a plasmid vector or a phage vector, as shown in Table 5. These deposits are referred to as “the deposits” herein. The tissues from which the clones were derived are listed in Table 5, and the vector in which the cDNA is contained is also indicated in Table 5. The deposited material includes the cDNA clones which were partially sequenced and are related to the SEQ ID NO:X described in Table 1 (column 9). Thus, a clone which is isolatable from the ATCC Deposits by use of a sequence listed as SEQ ID NO:X may include the entire coding region of a human gene or in other cases such clone may include a substantial portion of the coding region of a human gene. Although the sequence listing lists only a portion of the DNA sequence in a clone included in the ATCC Deposits, it is well within the ability of one skilled in the art to complete the sequence of the DNA included in a clone isolatable from the ATCC Deposits by use of a sequence (or portion thereof) listed in Table 1 by procedures hereinafter further described, and others apparent to those skilled in the art.

[0050] Also provided in Table 5 is the name of the vector which contains the cDNA clone. Each vector is routinely used in the art. The following additional information is provided for convenience.

[0051] Vectors Lambda Zap (U.S. Pat. Nos. 5,128,256 and 5,286,636), Uni-Zap XR (U.S. Pat. Nos. 5,128,256 and 5,286,636), Zap Express (U.S. Pat. Nos. 5,128,256 and 5,286,636), pBluescript (pBS) (Short, J. M. et al., Nucleic Acids Res. 16:7583-7600 (1988); Alting-Mees, M. A. and Short, J. M., Nucleic Acids Res. 17:9494 (1989)) and pBK (Alting-Mees, M. A. et al., Strategies 5:58-61 (1992)) are commercially available from Stratagene Cloning Systems, Inc., 11011 N. Torrey Pines Road, La Jolla, Calif., 92037. pBS contains an ampicillin resistance gene and pBK contains a neomycin resistance gene. Phagemid pBS may be excised from the Lambda Zap and Uni-Zap XR vectors, and phagemid pBK may be excised from the Zap Express vector. Both phagemids may be transformed into E. coli strain XL-1 Blue, also available from Stratagene.

[0052] Vectors pSport1, pCMVSport 1.0, pCMVSport 2.0 and pCMVSport 3.0, were obtained from Life Technologies, Inc., P. O. Box 6009, Gaithersburg, Md. 20897. All Sport vectors contain an ampicillin resistance gene and may be transformed into E. coli strain DH10B, also available from Life Technologies. See, for instance, Gruber, C. E., et al., Focus 15:59 (1993). Vector lafmid BA (Bento Soares, Columbia University, New York, N.Y.) contains an ampicillin resistance gene and can be transformed into E. coli strain XL-1 Blue. Vector pCR®2.1, which is available from Invitrogen, 1600 Faraday Avenue, Carlsbad, Calif. 92008, contains an ampicillin resistance gene and may be transformed into E. coli strain DH10B, available from Life Technologies. See, for instance, Clark, J. M., Nuc. Acids Res. 16:9677-9686 (1988) and Mead, D. et al., Bio/Technology 9: (1991).

[0053] The present invention also relates to the genes corresponding to SEQ ID NO:X, SEQ ID NO:Y, and/or the cDNA contained in a deposited cDNA clone. The corresponding gene can be isolated in accordance with known methods using the sequence information disclosed herein. Such methods include, but are not limited to, preparing probes or primers from the disclosed sequence and identifying or amplifying the corresponding gene from appropriate sources of genomic material.

[0054] Also provided in the present invention are allelic variants, orthologs, and/or species homologs. Procedures known in the art can be used to obtain full-length genes, allelic variants, splice variants, full-length coding portions, orthologs, and/or species homologs of genes corresponding to SEQ ID NO:X, SEQ ID NO:Y, and/or the cDNA contained in the related cDNA clone in the deposit, using information from the sequences disclosed herein or the clones deposited with the ATCC. For example, allelic variants and/or species homologs may be isolated and identified by making suitable probes or primers from the sequences provided herein and screening a suitable nucleic acid source for allelic variants and/or the desired homologue.

[0055] The present invention provides a polynucleotide comprising, or alternatively consisting of, the nucleic acid sequence of SEQ ID NO:X, and/or the related cDNA clone (See, e.g., columns 1 and 9 of Table 1). The present invention also provides a polypeptide comprising, or alternatively, consisting of, the polypeptide sequence of SEQ ID NO:Y, a polypeptide encoded by SEQ ID NO:X, and/or a polypeptide encoded by the cDNA in the related cDNA clone contained in a deposited library. Polynucleotides encoding a polypeptide comprising, or alternatively consisting of, the polypeptide sequence of SEQ ID NO:Y, a polypeptide encoded by SEQ ID NO:X, and/or a polypeptide encoded by the the cDNA in the related cDNA clone contained in a deposited library, are also encompassed by the invention. The present invention further encompasses a polynucleotide comprising, or alternatively consisting of, the complement of the nucleic acid sequence of SEQ ID NO:X, and/or the complement of the coding strand of the related cDNA clone contained in a deposited library.

[0056] Many polynucleotide sequences, such as EST sequences, are publicly available and accessible through sequence databases and may have been publicly available prior to conception of the present invention. Preferably, such related polynucleotides are specifically excluded from the scope of the present invention. To list every related sequence would unduly burden the disclosure of this application. Accordingly, for each “Contig Id” listed in the first column of Table 3, preferably excluded are one or more polynucleotides comprising a nucleotide sequence described in the second column of Table 3 by the general formula of a-b, each of which are uniquely defined for the SEQ ID NO:X corresponding to that Contig Id in Table 1. Additionally, specific embodiments are directed to polynucleotide sequences excluding at least one, two, three, four, five, ten, or more of the specific polynucleotide sequences referenced by the Genbank Accession No. for each Contig Id which may be included in column 3 of Table 3. In no way is this listing meant to encompass all of the sequences which may be excluded by the general formula, it is just a representative example.

TABLE 3

| Sequence/ | | | | |
|---|---|---|---|---|
| Contig ID | General formula | Genbank Accession No. | | |
| 500802 | Preferably excluded from the present invention are one or more | | | |
| | polynucleotides comprising a nucleotide sequence described by the | | | |
| | general formula of a-b, where a is any integer between ito 619 of SEQ | | | |
| | ID NO:1, b is an integer of 15 to 633, where both a and b correspond to | | | |
| | the positions of nucleotide residues shown in SEQ ID NO:1, and where | | | |
| | b is greater than or equal to a +14. | | | |
| 531091 | Preferably excluded from the present invention are one or more | | | |
| | polynucleotides comprising a nucleotide sequence described by the | | | |
| | general formula of a-b, where a is any integer between 1 to 281 of SEQ | | | |
| | ID NO:2, b is an integer of 15 to 295, where both a and b correspond to | | | |
| | the positions of nucleotide residues shown in SEQ ID NO:2, and where | | | |
| | b is greater than or equal to a + 14. | | | |
| 553147 | Preferably excluded from the present invention are one or more | | | |
| | Polynucleotides comprising a nucleotide sequence described by the | | | |
| | general formula of a-b, where a is any integer between 1 to 428 of SEQ | | | |
| | ID NO:3, b is an integer of 15 to 442, where both a and b correspond to | | | |
| | the positions of nucleotide residues shown in SEQ ID NO:3, and where | | | |
| | b is greater than or equal to a + 14. | | | |
| 558860 | Preferably excluded from the present invention are one or more | | | |
| | polynucleotides comprising a nucleotide sequence described by the | | | |
| | general formula of a-b, where a is any integer between 1 to 740 of SEQ | | | |
| | ID NO:4, b is an integer of 15 to 754, where both a and b correspond to | | | |
| | the positions of nucleotide residues shown in SEQ ID NO:4, and where | | | |
| | b is greater than or equal to a + 14. | | | |
| 561730 | Preferably excluded from the present invention are one or more | | | |
| | polynucleotides comprising a nucleotide sequence described by the | | | |
| | general formula of a-b, where a is any integer between 1 to 379 of SEQ | | | |
| | ID NO:5, b is an integer of 15 to 393, where both a and b correspond to | | | |
| | the positions of nucleotide residues shown in SEQ ID NO:5, and where | | | |
| | b is greater than or equal to a + 14. | | | |
| 585938 | Preferably excluded from the present invention are one or more | | | |
| | polynucleotides comprising a nucleotide sequence described by the | | | |
| | general formula of a-b, where a is any integer between 1 to 525 of SEQ | | | |
| | ID NO:6, b is an integer of 15 to 539, where both a and b correspond to | | | |
| | the positions of nucleotide residues shown in SEQ ID NO:6, and where | | | |
| | is greater than or equal to a + 14. | | | |
| 587785 | Preferably excluded from the present invention are one or more | | | |
| | polynucleotides comprising a nucleotide sequence described by the | | | |
| | general formula of a-b, where a is any integer between 1 to 790 of SEQ | | | |
| | ID NO:7, b is an integer of 15 to 804, where both a and b correspond to | | | |
| | the positions of nucleotide residues shown in SEQ ID NO:7, and where | | | |
| | is greater than or equal to a + 14. | | | |
| 588916 | Preferably excluded from the present invention are one or more | | | |
| | polynucleotides comprising a nucleotide sequence described by the | | | |
| | general formula of a-b, where a is any integer between 1 to 706 of SEQ | | | |
| | ID NO:8, b is an integer of 15 to 720, where both a and b correspond to | | | |
| | the positions of nucleotide residues shown in SEQ ID NO:8, and where | | | |
| | is greater than or equal to a + 14. | | | |
| 613825 | Preferably excluded from the present invention are one or more | | | |
| | polynucleotides comprising a nucleotide sequence described by the | | | |
| | general formula of a-b, where a is any integer between 1 to 526 of SEQ | | | |
| | ID NO:9, b is an integer of 15 to 540, where both a and b correspond to | | | |
| | the positions of nucleotide residues shown in SEQ ID NO:9, and where | | | |
| | b is greater than or equal to a + 14. | | | |
| 639090 | Preferably excluded from the present invention are one or more | | | |
| | polynucleotides comprising a nucleotide sequence described by the | | | |
| | general formula of a-b, where a is any integer between 1 to 547 of SEQ | | | |
| | ID NO:10, b is an integer of 15 to 561, where both a and b correspond | | | |
| | to the positions of nucleotide residues shown in SEQ ID NO:10, and | | | |
| | where b is greater than or equal to a + 14. | | | |
| 651644 | Preferably excluded from the present invention are one or more | | | |
| | polynucleotides comprising a nucleotide sequence described by the | | | |
| | general formula of a-b, where a is any integer between 1 to 379 of SEQ | | | |
| | ID NO:11, b is an integer of 15 to 393, where both a and b correspond | | | |
| | to the positions of nucleotide residues shown in SEQ ID NO:11, and | | | |
| | where b is greater than or equal to a + 14. | | | |
| 659544 | Preferably excluded from the present invention are one or more | | | |
| | polynucleotides comprising a nucleotide sequence described by the | | | |
| | general formula of a-b, where a is any integer between 1 to 308 of SEQ | | | |
| | ID NO:12, b is an integer of 15 to 322, where both a and b correspond | | | |
| | to the positions of nucleotide residues shown in SEQ ID NO:12, and | | | |
| | where b is greater than or equal to a + 14. | | | |
| 659739 | Preferably excluded from the present invention are one or more | | | |
| | polynucleotides comprising a nucleotide sequence described by the | | | |
| | general formula of a-b, where a is any integer between 1 to 1893 of | | | |
| | SEQ ID NO:13, b is an integer of 15 to 1907, where both a and b | | | |
| | correspond to the positions of nucleotide residues shown in SEQ ID | | | |
| | NO:13, and where b is greater than or equal to a + 14. | | | |
| 661057 | Preferably excluded from the present invention are one or more | | | |
| | polynucleotides comprising a nucleotide sequence described by the | | | |
| | general formula of a-b, where a is any integer between 1 to 1126 of | | | |
| | SEQ ID NO:14, b is an integer of 15 to 1140, where both a and b | | | |
| | correspond to the positions of nucleotide residues shown in SEQ ID | | | |
| | NO:14, and where b is greater than or equal to a + 14. | | | |
| 661313 | Preferably excluded from the present invention are one or more | | | |
| | polynucleotides comprising a nucleotide sequence described by the | | | |
| | general formula of a-b, where a is any integer between 1 to 1994 of | | | |
| | SEQ ID NO:15, b is an integer of 15 to 2008, where both a and b | | | |
| | correspond to the positions of nucleotide residues shown in SEQ ID | | | |
| | NO:15, and where b is greater than or equal to a + 14. | | | |
| 666316 | referably excluded from the present invention are one or more | | | |
| | polynucleotides comprising a nucleotide sequence described by the | | | |
| | general formula of a-b, where a is any integer between 1 to 357 of SEQ | | | |
| | ID NO:16, b is an integer of 15 to 371, where both a and b correspond | | | |
| | to the positions of nucleotide residues shown in SEQ ID NO: 16, and | | | |
| | where b is greater than or equal to a + 14. | | | |
| 669229 | Preferably excluded from the present invention are one or more | | | |
| | polynucleotides comprising a nucleotide sequence described by the | | | |
| | general formula of a-b, where a is any integer between 1 to 749 of SEQ | | | |
| | ID NO:17, b is an integer of 15 to 763, where both a and b correspond | | | |
| | to the positions of nucleotide residues shown in SEQ ID NO:17, and | | | |
| | where b is greater than or equal to a + 14. | | | |
| 670471 | Preferably excluded from the present invention are one or more | | | |
| | polynucleotides comprising a nucleotide sequence described by the | | | |
| | general formula of a-b, where a is any integer between 1 to 1912 of | | | |
| | SEQ ID NO:18, b is an integer of 15 to 1926, where both a and b | | | |
| | correspond to the positions of nucleotide residues shown in SEQ ID | | | |
| | NO::18, and where b is greater than or equal to a + 14. | | | |
| 676611 | Preferably excluded from the present invention are one or more | | | |
| | polynucleotides comprising a nucleotide sequence described by the | | | |
| | general formula of a-b, where a is any integer between 1 to 2287 of | | | |
| | SEQ ID NO:19, b is an integer of 15 to 2301, where both a and b | | | |
| | correspond to the positions of nucleotide residues shown in SEQ ID | | | |
| | NO:19, and where b is greater than or equal to a + 14. | | | |
| 691240 | Preferably excluded from the present invention are one or more | | | |
| | polynucleotides comprising a nucleotide sequence described by the | | | |
| | general formula of a-b, where a is any integer between 1 to 524 of SEQ | | | |
| | ID NO:20, b is an integer of 15 to 538, where both a and b correspond | | | |
| | to the positions of nucleotide residues shown in SEQ ID NO:20, and | | | |
| | where b is greater than or equal to a + 14. | | | |
| 702977 | Preferably excluded from the present invention are one or more | | | |
| | polynucleotides comprising a nucleotide sequence described by the | | | |
| | general formula of a-b, where a is any integer between 1 to 1389 of | | | |
| | SEQ ID NO:21, b is an integer of 15 to 1403, where both a and b | | | |
| | correspond to the positions of nucleotide residues shown in SEQ ID | | | |
| | NO:21, and where b is greater than or equal to a + 14. | | | |
| 709517 | Preferably excluded from the present invention are one or more | | | |
| | polynucleotides comprising a nucleotide sequence described by the | | | |
| | general formula of a-b, where a is any integer between 1 to 464 of SEQ | | | |
| | ID NO:22, b is an integer of 15 to 478, where both a and b correspond | | | |
| | to the positions of nucleotide residues shown in SEQ ID NO:22, and | | | |
| | where b is greater than or equal to a + 14. | | | |
| 714730 | Preferably excluded from the present invention are one or more | | | |
| | polynucleotides comprising a nucleotide sequence described by the | | | |
| | general formula of a-b, where a is any integer between 1 to 1238 of | | | |
| | SEQ ID NO:23, b is an integer of 15 to 1252, where both a and b | | | |
| | correspond to the positions of nucleotide residues shown in SEQ ID | | | |
| | NO:23, and where b is greater than or equal to a + 14. | | | |
| 714834 | Preferably excluded from the present invention are one or more | | | |
| | polynucleotides comprising a nucleotide sequence described by the | | | |
| | general formula of a-b, where a is any integer between 1 to 1060 of | | | |
| | SEQ ID NO:24, b is an integer of 15 to 1074, where both a and b | | | |
| | correspond to the positions of nucleotide residues shown in SEQ ID | | | |
| | NO:24, and where b is greater than or equal to a + 14. | | | |
| 715016 | Preferably excluded from the present invention are one or more | | | |
| | polynucleotides comprising a nucleotide sequence described by the | | | |
| | general formula of a-b, where a is any integer between 1 to 1172 of | | | |
| | SEQ ID NO:25, b is an integer of 15 to 1186, where both a and b | | | |
| | correspond to the positions of nucleotide residues shown in SEQ ID | | | |
| | NO:25, and where b is greater than or equal to a + 14. | | | |
| 719584 | Preferably excluded from the present invention are one or more | | | |
| | polynucleotides comprising a nucleotide sequence described by the | | | |
| | general formula of a-b, where a is any integer between 1 to 874 of SEQ | | | |
| | ID NO:26, b is an integer of 15 to 888, where both a and b correspond | | | |
| | to the positions of nucleotide residues shown in SEQ ID NO:26, and | | | |
| | where b is greater than or equal to a + 14. | | | |
| 724637 | Preferably excluded from the present invention are one or more | | | |
| | polynucleotides comprising a nucleotide sequence described by the | | | |
| | general formula of a-b, where a is any integer between 1 to 775 of SEQ | | | |
| | ID NO:27, b is an integer of 15 to 789, where both a and b correspond | | | |
| | to the positions of nucleotide residues shown in SEQ ID NO:27, and | | | |
| | where b is greater than or equal to a + 14. | | | |
| 728392 | Preferably excluded from the present invention are one or more | | | |
| | polynucleotides comprising a nucleotide sequence described by the | | | |
| | general formula of a-b, where a is any integer between 1 to 833 of SEQ | | | |
| | ID NO:28, b is an integer of 15 to 847, where both a and b correspond | | | |
| | to the positions of nucleotide residues shown in SEQ ID NO:28, and | | | |
| | where b is greater than or equal to a + 14. | | | |
| 738716 | Preferably excluded from the present invention are one or more | | | |
| | polynucleotides comprising a nucleotide sequence described by the | | | |
| | general formula of a-b, where a is any integer between 1 to 652 of SEQ | | | |
| | ID NO:29, b is an integer of 15 to 666, where both a and b correspond | | | |
| | to the positions of nucleotide residues shown in SEQ ID NO:29, and | | | |
| | where b is greater than or equal to a + 14. | | | |
| 739056 | Preferably excluded from the present invention are one or more | | | |
| | polynucleotides comprising a nucleotide sequence described by the | | | |
| | general formula of a-b, where a is any integer between 1 to 503 of SEQ | | | |
| | ID NO:30, b is an integer of 15 to 517, where both a and b correspond | | | |
| | to the positions of nucleotide residues shown in SEQ ID NO:30, and | | | |
| | where b is greater than or equal to a + 14. | | | |
| 739143 | Preferably excluded from the present invention are one or more | | | |
| | polynucleotides comprising a nucleotide sequence described by the | | | |
| | general formula of a-b, where a is any integer between 1 to 2661 of | | | |
| | SEQ ID NO:31, b is an integer of 15 to 2675, where both a and b | | | |
| | correspond to the positions of nucleotide residues shown in SEQ ID | | | |
| | NO:31, and where b is greater than or equal to a + 14. | | | |
| 742329 | Preferably excluded from the present invention are one or more | | | |
| | polynucleotides comprising a nucleotide sequence described by the | | | |
| | general formula of a-b, where a is any integer between 1 to 263 of SEQ | | | |
| | ID NO:32, b is an integer of 15 to 277, where both a and b correspond | | | |
| | to the positions of nucleotide residues shown in SEQ ID NO:32, and | | | |
| | where b is greater than or equal to a + 14. | | | |
| 742557 | Preferably excluded from the present invention are one or more | | | |
| | polynucleotides comprising a nucleotide sequence described by the | | | |
| | general formula of a-b, where a is any integer between 1 to 907 of SEQ | | | |
| | ID NO:33, b is an integer of 15 to 921, where both a and b correspond | | | |
| | to the positions of nucleotide residues shown in SEQ ID NO:33, and | | | |
| | where b is greater than or equal to a + 14. | | | |
| 745481 | Preferably excluded from the present invention are one or more | | | |
| | polynucleotides comprising a nucleotide sequence described by the | | | |
| | general formula of a-b, where a is any integer between 1 to 1453 of | | | |
| | SEQ ID NO:34, b is an integer of 15 to 1467, where both a and b | | | |
| | correspond to the positions of nucleotide residues shown in SEQ ID | | | |
| | NO:34, and where b is greater than or equal to a + 14. | | | |
| 746035 | Preferably excluded from the present invention are one or more | | | |
| | polynucleotides comprising a nucleotide sequence described by the | | | |
| | general formula of a-b, where a is any integer between 1 to 2063 of | | | |
| | SEQ ID NO:35, b is an integer of 15 to 2077, where both a and b | | | |
| | correspond to the positions of nucleotide residues shown in SEQ ID | | | |
| | NO:35, and where b is greater than or equal to a + 14. | | | |
| 753731 | Preferably excluded from the present invention are one or more | | | |
| | polynucleotides comprising a nucleotide sequence described by the | | | |
| | general formula of a-b, where a is any integer between 1 to 370 of SEQ | | | |
| | ID NO:36, b is an integer of 15 to 384, where both a and b correspond | | | |
| | to the positions of nucleotide residues shown in SEQ ID NO:36, and | | | |
| | where b is greater than or equal to a + 14. | | | |
| 754383 | Preferably excluded from the present invention are one or more | | | |
| | polynucleotides comprising a nucleotide sequence described by the | | | |
| | general formula of a-b, where a is any integer between 1 to 454 of SEQ | | | |
| | ID NO:37, b is an integer of 15 to 468, where both a and b correspond | | | |
| | to the positions of nucleotide residues shown in SEQ ID NO:37, and | | | |
| | where b is greater than or equal to a + 14. | | | |
| 756749 | Preferably excluded from the present invention are one or more | | | |
| | polynucleotides comprising a nucleotide sequence described by the | | | |
| | general formula of a-b, where a is any integer between 1 to 1081 of | | | |
| | SEQ ID NO:38, b is an integer of 15 to 1095, where both a and b | | | |
| | correspond to the positions of nucleotide residues shown in SEQ ID | | | |
| | NO:38, and where b is greater than or equal to a + 14. | | | |
| 757980 | Preferably excluded from the present invention are one or more | R38216, R63249, R78721, H101441, 1102557, H02640, | | |
| | polynucleotides comprising a nucleotide sequence described by the | H186258, H86321, N21599, W16868, W31882, W56228, | | |
| | general formula of a-b, where a is any integer between 1 to 1743 of | N90610, AA047227, A056107, AA058568, AA100609, | | |
| | SEQ ID NO:39, b is an integer of 15 to 1757, where both a and b | AA115890 | | |
| | correspond to the positions of nucleotide residues shown in SEQ ID | | | |
| | NO:39, and where b is greater than or equal to a + 14. | | | |
| 764818 | Preferably excluded from the present invention are one or more | | | |
| | polynucleotides comprising a nucleotide sequence described by the | | | |
| | general formula of a-b, where a is any integer between 1 to 1931 of | | | |
| | SEQ ID NO:40, b is an integer of 15 to 1945, where both a and b | | | |
| | correspond to the positions of nucleotide residues shown in SEQ ID | | | |
| | NO:40, and where b is greater than or equal to a + 14. | | | |
| 765140 | Preferably excluded from the present invention are one or more | | | |
| | polynucleotides comprising a nucleotide sequence described by the | | | |
| | general formula of a-b, where a is any integer between 1 to 574 of SEQ | | | |
| | ID NO:41, b is an integer of 15 to 588, where both a and b correspond | | | |
| | to the positions of nucleotide residues shown in SEQ ID NO:4 1, and | | | |
| | where b is greater than or equal to a + 14. | | | |
| 766893 | Preferably excluded from the present invention are one or more | R69702, R76994, R77002, H01357 | | |
| | Polynucleotides comprising a nucleotide sequence described by the | | | |
| | general formula of a-b, where a is any integer between 1 to 1554 of | | | |
| | SEQ ID NO:42, b is an integer of 15 to 1568, where both a and b | | | |
| | correspond to the positions of nucleotide residues shown in SEQ ID | | | |
| | NO:42, and where b is greater than or equal to a + 14. | | | |
| 771338 | Preferably excluded from the present invention are one or more | | | |
| | polynucleotides comprising a nucleotide sequence described by the | | | |
| | general formula of a-b, where a is any integer between 1 to 1046 of | | | |
| | SEQ ID NO:43, b is an integer of 15 to 1060, where both a and b | | | |
| | correspond to the positions of nucleotide residues shown in SEQ ID | | | |
| | NO:43, and where b is greater than or equal to a + 14. | | | |
| 771412 | Preferably excluded from the present invention are one or more | | | |
| | polynucleotides comprising a nucleotide sequence described by the | | | |
| | general formula of a-b, where a is any integer between 1 to 1330 of | | | |
| | SEQ ID NO:44, b is an integer of 15 to 1344, where both a and b | | | |
| | correspond to the positions of nucleotide residues shown in SEQ ID | | | |
| | NO:44, and where b is greater than or equal to a + 14. | | | |
| 772226 | Preferably excluded from the present invention are one or more | | | |
| | polynucleotides comprising a nucleotide sequence described by the | | | |
| | general formula of a-b, where a is any integer between 1 to 878 of SEQ | | | |
| | ID NO:45, b is an integer of 15 to 892, where both a and b correspond | | | |
| | to the positions of nucleotide residues shown in SEQ ID NO:45, and | | | |
| | where b is greater than or equal to a + 14. | | | |
| 773057 | Preferably excluded from the present invention are one or more | N41725 | | |
| | polynucleotides comprising a nucleotide sequence described by the | | | |
| | general formula of a-b, where a is any integer between 1 to 482 of SEQ | | | |
| | ID NO:46, b is an integer of 15 to 496, where both a and b correspond | | | |
| | to the positions of nucleotide residues shown in SEQ ID NO:46, and | | | |
| | where b is greater than or equal to a + 14. | | | |
| 773173 | Preferably excluded from the present invention are one or more | | | |
| | polynucleotides comprising a nucleotide sequence described by the | | | |
| | general formula of a-b, where a is any integer between 1 to 1215 of | | | |
| | SEQ ID NO:47, b is an integer of 15 to 1229, where both a and b | | | |
| | correspond to the positions of nucleotide residues shown in SEQ ID | | | |
| | NO:47, and where b is greater than or equal to a + 14. | | | |
| 780154 | Preferably excluded from the present invention are one or more | | | |
| | polynucleotides comprising a nucleotide sequence described by the | | | |
| | general formula of a-b, where a is any integer between 1 to 1397 of | | | |
| | SEQ ID NO:48, b is an integer of 15 to 1411, where both a and b | | | |
| | correspond to the positions of nucleotide residues shown in SEQ ID | | | |
| | NO:48, and where b is greater than or equal to a + 14. | | | |
| 780768 | Preferably excluded from the present invention are one or more | | | |
| | polynucleotides comprising a nucleotide sequence described by the | | | |
| | general formula of a-b, where a is any integer between 1 to 1671 of | | | |
| | SEQ ID N0:49, b is an integer of 15 to 1685, where both a and b | | | |
| | correspond to the positions of nucleotide residues shown in SEQ ID | | | |
| | NO:49, and where b is greater than or equal to a + 14. | | | |
| 780779 | Preferably excluded from the present invention are one or more | | | |
| | polynucleotides comprising a nucleotide sequence described by the | | | |
| | general formula of a-b, where a is any integer between 1 to 646 of SEQ | | | |
| | ID NO:50, b is an integer of 15 to 660, where both a and b correspond | | | |
| | to the positions of nucleotide residues shown in SEQ ID NO:50, and | | | |
| | where b is greater than or equal to a + 14. | | | |
| 782394 | Preferably excluded from the present invention are one or more | R24689, R25853, R34457, R66839, R68536, H22874, | | |
| | polynucleotides comprising a nucleotide sequence described by the | H45555, N50184, AA015963, AA028939, AA028938 | | |
| | general formula of a-b, where a is any integer between 1 to 1558 of | | | |
| | SEQ ID NO:51, b is an integer of 15 to 1572, where both a and b | | | |
| | correspond to the positions of nucleotide residues shown in SEQ ID | | | |
| | NO:51, and where b is greater than or equal to a + 14. | | | |
| 783160 | Preferably excluded from the present invention are one or more | | | |
| | polynucleotides comprising a nucleotide sequence described by the | | | |
| | general formula of a-b, where a is any integer between 1 to 621 of SEQ | | | |
| | ID N0:52, b is an integer of 15 to 635, where both a and b correspond | | | |
| | to the positions of nucleotide residues shown in SEQ ID NO:52, and | | | |
| | where b is greater than or equal to a + 14. | | | |
| 783506 | Preferably excluded from the present invention are one or more | | | |
| | polynucleotides comprising a nucleotide sequence described by the | | | |
| | general formula of a-b, where a is any integer between 1 to 1353 of | | | |
| | SEQ ID NO:53, b is an integer of 15 to 1367, where both a and b | | | |
| | correspond to the positions of nucleotide residues shown in SEQ ID | | | |
| | NO:53, and where b is greater than or equal to a + 14. | | | |
| 784446 | Preferably excluded from the present invention are one or more | | | |
| | polynucleotides comprising a nucleotide sequence described by the | | | |
| | general formula of a-b, where a is any integer between 1 to 364 of SEQ | | | |
| | ID NO:54, b is an integer of 15 to 378, where both a and b correspond | | | |
| | to the positions of nucleotide residues shown in SEQ ID NO:54, and | | | |
| | where b is greater than or equal to a + 14. | | | |
| 784832 | Preferably excluded from the present invention are one or more | | | |
| | polynucleotides comprising a nucleotide sequence described by the | | | |
| | general formula of a-b, where a is any integer between 1 to 1044 of | | | |
| | SEQ ID NO:55, b is an integer of 15 to 1058, where both a and b | | | |
| | correspond to the positions of nucleotide residues shown in SEQ ID | | | |
| | NO:55, and where b is greater than or equal to a + 14. | | | |
| 786813 | Preferably excluded from the present invention are one or more | W44740, AA235981 | | |
| | polynucleotides comprising a nucleotide sequence described by the | | | |
| | general formula of a-b, where a is any integer between 1 to 668 of SEQ | | | |
| | ID NO:56, b is an integer of 15 to 682, where both a and b correspond | | | |
| | to the positions of nucleotide residues shown in SEQ ID NO:56, and | | | |
| | where b is greater than or equal to a + 14. | | | |
| 792139 | Preferably excluded from the present invention are one or more | | | |
| | polynucleotides comprising a nucleotide sequence described by the | | | |
| | general formula of a-b, where a is any integer between 1 to 630 of SEQ | | | |
| | ID NO:57, b is an integer of 15 to 644, where both a and b correspond | | | |
| | to the positions of nucleotide residues shown in SEQ ID NO:57, and | | | |
| | where b is greater than or equal to a + 14. | | | |
| 793987 | Preferably excluded from the present invention are one or more | | | |
| | polynucleotides comprising a nucleotide sequence described by the | | | |
| | general formula of a-b, where a is any integer between 1 to 752 of SEQ | | | |
| | ID NO:58, b is an integer of 15 to 766, where both a and b correspond | | | |
| | to the positions of nucleotide residues shown in SEQ ID NO:58, and | | | |
| | where b is greater than or equal to a + 14. | | | |
| 805715 | Preferably excluded from the present invention are one or more | | | |
| | polynucleotides comprising a nucleotide sequence described by the | | | |
| | general formula of a-b, where a is any integer between 1 to 2347 of | | | |
| | SEQ ID NO:59, b is an integer of 15 to 2361, where both a and b | | | |
| | correspond to the positions of nucleotide residues shown in SEQ ID | | | |
| | NO:59, and where b is greater than or equal to a + 14. | | | |
| 811111 | Preferably excluded from the present invention are one or more | R11325, R11326, R43655, R43655, R72437, R78096, | | |
| | polynucleotides comprising a nucleotide sequence described by the | H23850, N20947, N22686, N25829, N27270, N31401, | | |
| | general formula of a-b, where a is any integer between 1 to 1458 of | N40002, N46020, W92748, W92871, AA461202, | | |
| | SEQ ID NO:60, b is an integer of 15 to 1472, where both a and b | AA461382 | | |
| | correspond to the positions of nucleotide residues shown in SEQ ID | | | |
| | NO:60, and where b is greater than or equal to a + 14. | | | |
| 811113 | Preferably excluded from the present invention are one or more | | | |
| | polynucleotides comprising a nucleotide sequence described by the | | | |
| | general formula of a-b, where a is any integer between 1 to 1658 of | | | |
| | SEQ ID NO:61, b is an integer of 15 to 1672, where both a and b | | | |
| | correspond to the positions of nucleotide residues shown in SEQ ID | | | |
| | NO:61, and where b is greater than or equal to a + 14. | | | |
| 823902 | Preferably excluded from the present invention are one or more | | | |
| | polynucleotides comprising a nucleotide sequence described by the | | | |
| | general formula of a-b, where a is any integer between 1 to 1526 of | | | |
| | SEQ ID NO:62, b is an integer of 15 to 1540, where both a and b | | | |
| | correspond to the positions of nucleotide residues shown in SEQ ID | | | |
| | NO:62, and where b is greater than or equal to a + 14. | | | |
| 826518 | Preferably excluded from the present invention are one or more | T60163, T60223, T61894, R12251, T81471, T81679, | | |
| | polynucleotides comprising a nucleotide sequence described by the | T95899, R98321, R98322, H52605, H59085, N27268, | | |
| | general formula of a-b, where a is any integer between 1 to 1030 of | N31506, N53499, N54486, N58236, N92460, AA027189, | | |
| | SEQ ID NO:63, b is an integer of 15 to 1044, where both a and b | AA045077, AA127016, AA418935, A426582 | | |
| | correspond to the positions of nucleotide residues shown in SEQ ID | | | |
| | NO:63, and where b is greater than or equal to a + 14. | | | |
| 826704 | Preferably excluded from the present invention are one or more | | | |
| | polynucleotides comprising a nucleotide sequence described by the | | | |
| | general formula of a-b, where a is any integer between 1 to 837 of SEQ | | | |
| | ID NO:64, b is an integer of 15 to 851, where both a and b correspond | | | |
| | to the positions of nucleotide residues shown in SEQ ID NO:64, and | | | |
| | where b is greater than or equal to a + 14. | | | |
| 827720 | Preferably excluded from the present invention are one or more | | | |
| | polynucleotides comprising a nucleotide sequence described by the | | | |
| | general formula of a-b, where a is any integer between 1 to 2779 of | | | |
| | SEQ ID NO:65, b is an integer of 15 to 2793, where both a and b | | | |
| | correspond to the positions of nucleotide residues shown in SEQ ID | | | |
| | NO:65, and where b is greater than or equal to a + 14. | | | |
| 828102 | Preferably excluded from the present invention are one or more | | | |
| | polynucleotides comprising a nucleotide sequence described by the | | | |
| | general formula of a-b, where a is any integer between 1 to 289 of SEQ | | | |
| | ID NO:66, b is an integer of 15 to 303, where both a and b correspond | | | |
| | to the positions of nucleotide residues shown in SEQ ID NO:66, and | | | |
| | where b is greater than or equal to a + 14. | | | |
| 828180 | Preferably excluded from the present invention are one or more | | | |
| | polynucleotides comprising a nucleotide sequence described by the | | | |
| | general formula of a-b, where a is any integer between 1 to 1396 of | | | |
| | SEQ ID NO:67, b is an integer of 15 to 1410, where both a and b | | | |
| | correspond to the positions of nucleotide residues shown in SEQ ID | | | |
| | NO:67, and where b is greater than or equal to a + 14. | | | |
| 828386 | Preferably excluded from the present invention are one or more | | | |
| | polynucleotides comprising a nucleotide sequence described by the | | | |
| | general formula of a-b, where a is any integer between 1 to 1010 of | | | |
| | SEQ ID NO:68, b is an integer of 15 to 1024, where both a and b | | | |
| | correspond to the positions of nucleotide residues shown in SEQ ID | | | |
| | NO:68, and where b is greater than or equal to a + 14. | | | |
| 828658 | Preferably excluded from the present invention are one or more | | | |
| | polynucleotides comprising a nucleotide sequence described by the | | | |
| | general formula of a-b, where a is any integer between 1 to 1834 of | | | |
| | SEQ ID NO:69, b is an integer of 15 to 1848, where both a and b | | | |
| | correspond to the positions of nucleotide residues shown in SEQ ID | | | |
| | NO:69, and where b is greater than or equal to a + 14. | | | |
| 828919 | Preferably excluded from the present invention are one or more | T66771, T66772, T71638, R08935, R09044, R09373, | | |
| | polynucleotides comprising a nucleotide sequence described by the | T80114, T85695, R00758, R00759, R12645, R19577, | | |
| | general formula of a-b, where a is any integer between 1 to 2668 of | R20545, R22041, R22097, R20545, R59701, R59811, | | |
| | SEQ ID NO:70, b is an integer of 15 to 2682, where both a and b | R60034, R60096, R60694, R76255, R81371, R81370, | | |
| | correspond to the positions of nucleotide residues shown in SEQ ID | H04390, H04415, H05912, H47622, H47647, R83679, | | |
| | NO:70, and where b is greater than or equal to a + 14. | H71735, H72298, N25487, N35542, N49731, N52660, | | |
| | | N67681, N75596, W03490, AA044638, AA044702, | | |
| | | A165090, AA164628, AA215698, AA215699, AA233182, | | |
| | | A233196, AA236759, AA256822, AA429489, AA428534 | | |
| 829572 | Preferably excluded from the present invention are one or more | T63032 | | |
| | polynucleotides comprising a nucleotide sequence described by the | | | |
| | general formula of a-b, where a is any integer between 1 to 398 of SEQ | | | |
| | ID NO:71, b is an integer of 15 to 412, where both a and b correspond | | | |
| | to the positions of nucleotide residues shown in SEQ ID NO:71, and | | | |
| | where b is greater than or equal to a + 14. | | | |
| 830138 | Preferably excluded from the present invention are one or more | | | |
| | polynucleotides comprising a nucleotide sequence described by the | | | |
| | general formula of a-b, where a is any integer between 1 to 1347 of | | | |
| | SEQ ID NO:72, b is an integer of 15 to 1361, where both a and b | | | |
| | correspond to the positions of nucleotide residues shown in SEQ ID | | | |
| | NO:72, and where b is greater than or equal to a + 14. | | | |
| 830208 | Preferably excluded from the present invention are one or more | R01611, N76461, W74577, W79757, AA045350, | | |
| | polynucleotides comprising a nucleotide sequence described by the | AA056064, AA190524 | | |
| | general formula of a-b, where a is any integer between 1 to 914 of SEQ | | | |
| | ID NO:73, b is an integer of 15 to 928, where both a and b correspond | | | |
| | to the positions of nucleotide residues shown in SEQ ID NO:73, and | | | |
| | where b is greater than or equal to a + 14. | | | |
| 830248 | Preferably excluded from the present invention are one or more | | | |
| | polynucleotides comprising a nucleotide sequence described by the | | | |
| | general formula of a-b, where a is any integer between 1 to 1172 of | | | |
| | SEQ ID NO:74, b is an integer of 15 to 1186, where both a and b | | | |
| | correspond to the positions of nucleotide residues shown in SEQ ID | | | |
| | NO:74, and where b is greater than or equal to a + 14. | | | |
| 830275 | Preferably excluded from the present invention are one or more | | | |
| | polynucleotides comprising a nucleotide sequence described by the | | | |
| | general formula of a-b, where a is any integer between 1 to 919 of SEQ | | | |
| | ID NO:75, b is an integer of 15 to 933, where both a and b correspond | | | |
| | to the positions of nucleotide residues shown in SEQ ID NO:75, and | | | |
| | where b is greater than or equal to a + 14. | | | |
| 830286 | Preferably excluded from the present invention are one or more | T90376, R46154, R46154, AA224239, AA467906, | | |
| | polynucleotides comprising a nucleotide sequence described by the | AA483293, A502593, AA513313, AA594445, | | |
| | general formula of a-b, where a is any integer between 1 to 1950 of | AA594570, AA594876, A579404, AA720893, | | |
| | SEQ ID NO:76, b is an integer of 15 to 1964, where both a and b | AA767344, AA857646, AA877489, A954868, | | |
| | correspond to the positions of nucleotide residues shown in SEQ ID | AA991634, A1014751, C02074, AA093141 | | |
| | NO:76, and where b is greater than or equal to a + 14. | | | |
| 830347 | Preferably excluded from the present invention are one or more | | | |
| | polynucleotides comprising a nucleotide sequence described by the | | | |
| | general formula of a-b, where a is any integer between 1 to 1788 of | | | |
| | SEQ ID NO:77, b is an integer of 15 to 1802, where both a and b | | | |
| | correspond to the positions of nucleotide residues shown in SEQ ID | | | |
| | NO:77, and where b is greater than or equal to a + 14. | | | |
| 830348 | Preferably excluded from the present invention are one or more | A983601 | | |
| | polynucleotides comprising a nucleotide sequence described by the | | | |
| | general formula of a-b, where a is any integer between 1 to 981 of SEQ | | | |
| | ID NO:78, b is an integer of 15 to 995, where both a and b correspond | | | |
| | to the positions of nucleotide residues shown in SEQ ID NO:78, and | | | |
| | where b is greater than or equal to a + 14. | | | |
| 830364 | Preferably excluded from the present invention are one or more | | | |
| | polynucleotides comprising a nucleotide sequence described by the | | | |
| | general formula of a-b, where a is any integer between 1 to 1201 of | | | |
| | SEQ ID NO:79, b is an integer of 15 to 1215, where both a and b | | | |
| | correspond to the positions of nucleotide residues shown in SEQ ID | | | |
| | NO:79, and where b is greater than or equal to a + 14. | | | |
| 830394 | Preferably excluded from the present invention are one or more | | | |
| | polynucleotides comprising a nucleotide sequence described by the | | | |
| | general formula of a-b, where a is any integer between 1 to 2646 of | | | |
| | SEQ ID NO:80, b is an integer of 15 to 2660, where both a and b | | | |
| | correspond to the positions of nucleotide residues shown in SEQ ID | | | |
| | NO:80, and where b is greater than or equal to a + 14. | | | |
| 830398 | Preferably excluded from the present invention are one or more | | | |
| | polynucleotides comprising a nucleotide sequence described by the | | | |
| | general formula of a-b, where a is any integer between 1 to 1776 of | | | |
| | SEQ ID NO:81, b is an integer of 15 to 1790, where both a and b | | | |
| | correspond to the positions of nucleotide residues shown in SEQ ID | | | |
| | NO:81, and where b is greater than or equal to a + 14. | | | |
| 830412 | Preferably excluded from the present invention are one or more | | | |
| | polynucleotides comprising a nucleotide sequence described by the | | | |
| | general formula of a-b, where a is any integer between 1 to 1336 of | | | |
| | SEQ ID NO:82, b is an integer of 15 to 1350, where both a and b | | | |
| | correspond to the positions of nucleotide residues shown in SEQ ID | | | |
| | NO:82, and where b is greater than or equal to a + 14. | | | |
| 830436 | Preferably excluded from the present invention are one or more | T89041, R38418, R51559, R62385, R63785, H21426, | | |
| | polynucleotides comprising a nucleotide sequence described by the | N55384, A009460, AA039527, AA039526, AA490811, | | |
| | general formula of a-b, where a is any integer between 1 to 1732 of | AA588539, A574253, AA827525, AA975094, D79482, | | |
| | SEQ ID NO:83, b is an integer of 15 to 1746, where both a and b | D79908, N55964, C14631, C14891, C14892 | | |
| | correspond to the positions of nucleotide residues shown in SEQ ID | | | |
| | NO:83, and where b is greater than or equal to a + 14. | | | |
| 830464 | Preferably excluded from the present invention are one or more | H06247, H19227, W52470 | | |
| | polynucleotides comprising a nucleotide sequence described by the | | | |
| | general formula of a-b, where a is any integer between 1 to 1477 of | | | |
| | SEQ ID NO:84, b is an integer of 15 to 1491, where both a and b | | | |
| | correspond to the positions of nucleotide residues shown in SEQ ID | | | |
| | NO:84, and where b is greater than or equal to a + 14. | | | |
| 830471 | Preferably excluded from the present invention are one or more | R28064, R28282, AA143044, AA151127, AA165093, | | |
| | polynucleotides comprising a nucleotide sequence described by the | AA164631, AA256943, AA765384, D80554 | | |
| | general formula of a-b, where a is any integer between 1 to 954 of SEQ | | | |
| | ID NO:85, b is an integer of 15 to 968, where both a and b correspond | | | |
| | to the positions of nucleotide residues shown in SEQ ID NO:85, and | | | |
| | where b is greater than or equal to a + 14. | | | |
| 830477 | Preferably excluded from the present invention are one or more | T71686, R81413, R81414, H52583, H84987, H87923, | | |
| | polynucleotides comprising a nucleotide sequence described by the | H88319, H88319, W74073, W79680, AA021098, | | |
| | general formula of a-b, where a is any integer between 1 to 3054 of | AA179389, AA182649, AA188175, AA191449, AA228943, | | |
| | SEQ ID NO:86, b is an integer of 15 to 3068, where both a and b | AA228942, AA594459, AA737972, C02737 | | |
| | correspond to the positions of nucleotide residues shown in SEQ ID | | | |
| | NO:86, and where b is greater than or equal to a + 14. | | | |
| 830500 | Preferably excluded from the present invention are one or more | | | |
| | polynucleotides comprising a nucleotide sequence described by the | | | |
| | general formula of a-b, where a is any integer between 1 to 2216 of | | | |
| | SEQ ID NO:87, b is an integer of 15 to 2230, where both a and b | | | |
| | correspond to the positions of nucleotide residues shown in SEQ ID | | | |
| | NO:87, and where b is greater than or equal to a + 14. | | | |
| 830509 | Preferably excluded from the present invention are one or more | | | |
| | polynucleotides comprising a nucleotide sequence described by the | | | |
| | general formula of a-b, where a is any integer between 1 to 1149 of | | | |
| | SEQ ID NO:88, b is an integer of 15 to 1163, where both a and b | | | |
| | correspond to the positions of nucleotide residues shown in SEQ ID | | | |
| | NO:88, and where b is greater than or equal to a + 14. | | | |
| 830528 | Preferably excluded from the present invention are one or more | | | |
| | polynucleotides comprising a nucleotide sequence described by the | | | |
| | general formula of a-b, where a is any integer between 1 to 1925 of | | | |
| | SEQ ID NO:89, b is an integer of 15 to 1939, where both a and b | | | |
| | correspond to the positions of nucleotide residues shown in SEQ ID | | | |
| | NO:89, and where b is greater than or equal to a + 14. | | | |
| 830542 | Preferably excluded from the present invention are one or more | T60268, T61648, T68371, T88743, R00503, R13392, | | |
| | polynucleotides comprising a nucleotide sequence described by the | R40908, R40908, H02114, 1107926, H29767, H29768, | | |
| | general formula of a-b, where a is any integer between 1 to 2018 of | H38826, H93354, W42415, W42513, W61060, W72566, | | |
| | SEQ ID NO:90, b is an integer of 15 to 2032, where both a and b | W76560, AA011078, AA011079, AA031697, AA031863, | | |
| | correspond to the positions of nucleotide residues shown in SEQ ID | AA058529, AA100913, AA100912, AA129619, AA129593, | | |
| | NO:90, and where b is greater than or equal to a + 14. | AA129330, AA128581, AA160087, AA160675, AA173629, | | |
| | | AA173985, AA186698, AA188326, AA480672, AA587251, | | |
| | | AA576938, AA743161, AA834774, AA872783, AA877207, | | |
| | | AA878505, AA923685, AA934427, AA962214, AA995455, | | |
| | | AA995857, N88876 | | |
| 830564 | Preferably excluded from the present invention are one or more | | | |
| | polynucleotides comprising a nucleotide sequence described by the | | | |
| | general formula of a-b, where a is any integer between 1 to 1774 of | | | |
| | SEQ ID NO:91, b is an integer of 15 to 1788, where both a and b | | | |
| | correspond to the positions of nucleotide residues shown in SEQ ID | | | |
| | NO:91, and where b is greater than or equal to a + 14. | | | |
| 830611 | Preferably excluded from the present invention are one or more | | | |
| | polynucleotides comprising a nucleotide sequence described by the | | | |
| | general formula of a-b, where a is any integer between 1 to 481 of SEQ | | | |
| | ID NO:92, b is an integer of 15 to 495, where both a and b correspond | | | |
| | to the positions of nucleotide residues shown in SEQ ID NO:92, and | | | |
| | where b is greater than or equal to a + 14. | | | |
| 830618 | Preferably excluded from the present invention are one or more | R43709, R43709, H09113, H43746, N92632, AA022453, | | |
| | polynucleotides comprising a nucleotide sequence described by the | AA120876, AA120889, AA493651, AA493785, AA494347, | | |
| | general formula of a-b, where a is any integer between 1 to 1363 of | AA565392, AA743179, AA769161 | | |
| | SEQ ID NO:93, b is an integer of 15 to 1377, where both a and b | | | |
| | correspond to the positions of nucleotide residues shown in SEQ ID | | | |
| | NO:93, and where b is greater than or equal to a + 14. | | | |
| 830620 | Preferably excluded from the present invention are one or more | | | |
| | polynucleotides comprising a nucleotide sequence described by the | | | |
| | general formula of a-b, where a is any integer between 1 to 2805 of | | | |
| | SEQ ID NO:94, b is an integer of 15 to 2819, where both a and b | | | |
| | correspond to the positions of nucleotide residues shown in SEQ ID | | | |
| | NO:94, and where b is greater than or equal to a + 14. | | | |
| 830630 | Preferably excluded from the present invention are one or more | | | |
| | polynucleotides comprising a nucleotide sequence described by the | | | |
| | general formula of a-b, where a is any integer between 1 to 691 of SEQ | | | |
| | ID NO:95, b is an integer of 15 to 705, where both a and b correspond | | | |
| | to the positions of nucleotide residues shown in SEQ ID NO:95, and | | | |
| | where b is greater than or equal to a + 14. | | | |
| 830654 | Preferably excluded from the present invention are one or more | | | |
| | polynucleotides comprising a nucleotide sequence described by the | | | |
| | general formula of a-b, where a is any integer between 1 to 3458 of | | | |
| | SEQ ID NO:96, b is an integer of 15 to 3472, where both a and b | | | |
| | correspond to the positions of nucleotide residues shown in SEQ ID | | | |
| | NO:96, and where b is greater than or equal to a + 14. | | | |
| 830660 | Preferably excluded from the present invention are one or more | | | |
| | polynucleotides comprising a nucleotide sequence described by the | | | |
| | general formula of a-b, where a is any integer between 1 to 1202 of | | | |
| | SEQ ID NO:97, b is an integer of 15 to 1216, where both a and b | | | |
| | correspond to the positions of nucleotide residues shown in SEQ ID | | | |
| | NO:97, and where b is greater than or equal to a + 14. | | | |
| 830661 | Preferably excluded from the present invention are one or more | | | |
| | polynucleotides comprising a nucleotide sequence described by the | | | |
| | general formula of a-b, where a is any integer between 1 to 1172 of | | | |
| | SEQ ID NO:98, b is an integer of 15 to 1186, where both a and b | | | |
| | correspond to the positions of nucleotide residues shown in SEQ ID | | | |
| | NO:98, and where b is greater than or equal to a + 14. | | | |
| 830704 | Preferably excluded from the present invention are one or more | | | |
| | polynucleotides comprising a nucleotide sequence described by the | | | |
| | general formula of a-b, where a is any integer between 1 to 1106 of | | | |
| | SEQ ID NO:99, b is an integer of 15 to 1120, where both a and b | | | |
| | correspond to the positions of nucleotide residues shown in SEQ ID | | | |
| | NO:99, and where b is greater than or equal to a + 14. | | | |
| 830765 | Preferably excluded from the present invention are one or more | | | |
| | polynucleotides comprising a nucleotide sequence described by the | | | |
| | general formula of a-b, where a is any integer between 1 to 1211 of | | | |
| | SEQ ID NO:100, b is an integer of 15 to 1225, where both a and b | | | |
| | correspond to the positions of nucleotide residues shown in SEQ ID | | | |
| | NO:100, and where b is greater than or equal to a + 14. | | | |
| 830778 | Preferably excluded from the present invention are one or more | | | |
| | polynucleotides comprising a nucleotide sequence described by the | | | |
| | general formula of a-b, where a is any integer between 1 to 1199 of | | | |
| | SEQ ID NO:101, b is an integer of 15 to 1213, where both a and b | | | |
| | correspond to the positions of nucleotide residues shown in SEQ ID | | | |
| | NO:101, and where b is greater than or equal to a + 14. | | | |
| 830784 | Preferably excluded from the present invention are one or more | R63323, R66534, AA49 1630 | | |
| | polynucleotides comprising a nucleotide sequence described by the | | | |
| | general formula of a-b, where a is any integer between 1 to 1550 of | | | |
| | SEQ ID NO: 102, b is an integer of 15 to 1564, where both a and b | | | |
| | correspond to the positions of nucleotide residues shown in SEQ ID | | | |
| | NO:102, and where b is greater than or equal to a + 14. | | | |
| 830800 | Preferably excluded from the present invention are one or more | | | |
| | polynucleotides comprising a nucleotide sequence described by the | | | |
| | general formula of a-b, where a is any integer between 1 to 1443 of | | | |
| | SEQ ID NO:103, b is an integer of 15 to 1457, where both a and b | | | |
| | correspond to the positions of nucleotide residues shown in SEQ ID | | | |
| | NO:103, and where b is greater than or equal to a + 14. | | | |
| 830821 | Preferably excluded from the present invention are one or more | | | |
| | polynucleotides comprising a nucleotide sequence described by the | | | |
| | general formula of a-b, where a is any integer between 1 to 771 of SEQ | | | |
| | ID NO: 104, b is an integer of 15 to 785, where both a and b correspond | | | |
| | to the positions of nucleotide residues shown in SEQ ID NO: 104, and | | | |
| | here b is greater than or equal to a + 14. | | | |
| 830849 | Preferably excluded from the present invention are one or more | A258128, AA259034, AA262104, | | |
| | polynucleotides comprising a nucleotide sequence described by the | AA742612, AA804402 | | |
| | general formula of a-b, where a is any integer between 1 to 907 of SEQ | | | |
| | ID NO:105, b is an integer of 15 to 921, where both a and b correspond | | | |
| | to the positions of nucleotide residues shown in SEQ ID NO: 105, and | | | |
| | where b is greater than or equal to a + 14. | | | |
| 830903 | Preferably excluded from the present invention are one or more | | | |
| | polynucleotides comprising a nucleotide sequence described by the | | | |
| | general formula of a-b, where a is any integer between 1 to 578 of SEQ | | | |
| | ID NO: 106, b is an integer of 15 to 592, where both a and b correspond | | | |
| | to the positions of nucleotide residues shown in SEQ ID NO: 106, and | | | |
| | where b is greater than or equal to a + 14. | | | |
| 830913 | Preferably excluded from the present invention are one or more | R06463, R06517, R48006, R51455, R61502, R72398, | | |
| | polynucleotides comprising a nucleotide sequence described by the | R72399, R74489, R74599, H07933, H08039, H61149, | | |
| | general formula of a-b, where a is any integer between 1 to 2234 of | H62056, H90758, H90809, N32837, N42283, W40284, | | |
| | SEQ ID NO:107, b is an integer of 15 to 2248, where both a and b | W45325, AA079353, AA079592, AA100814, AA102342, | | |
| | correspond to the positions of nucleotide residues shown in SEQ ID | AA111844, AA122150, AA134127, AA134128, AA148738, | | |
| | NO:107, and where b is greater than or equal to a + 14. | AA148709, AA164240, AA164899, AA164275, AA171881, | | |
| | | AA179310, AA179453, AA180811, AA180955, AA187432, | | |
| | | AA190377, AA190791, AA190383, AA458475, AA427428, | | |
| | | AA468548, AA554518, AA595768, AA595893, AA640601, | | |
| | | AA574035, AA658143, AA863401, AA906604, AA995159, | | |
| | | C03746, C04875, C05396, AA033510 | | |
| 830920 | Preferably excluded from the present invention are one or more | | | |
| | polynucleotides comprising a nucleotide sequence described by the | | | |
| | general formula of a-b, where a is any integer between 1 to 771 of SEQ | | | |
| | ID NO:108, b is an integer of 15 to 785, where both a and b correspond | | | |
| | to the positions of nucleotide residues shown in SEQ ID NO: 108, and | | | |
| | where b is greater than or equal to a + 14. | | | |
| 830938 | Preferably excluded from the present invention are one or more | A053612 | | |
| | polynucleotides comprising a nucleotide sequence described by the | | | |
| | general formula of a-b, where a is any integer between 1 to 597 of SEQ | | | |
| | ID NO:109, b is an integer of 15 to 611, where both a and b correspond | | | |
| | to the positions of nucleotide residues shown in SEQ ID NO: 109, and | | | |
| | where b is greater than or equal to a + 14. | | | |
| 830980 | Preferably excluded from the present invention are one or more | | | |
| | polynucleotides comprising a nucleotide sequence described by the | | | |
| | general formula of a-b, where a is any integer between 1 to 650 of SEQ | | | |
| | ID NO:110, b is an integer of 15 to 664, where both a and b correspond | | | |
| | to the positions of nucleotide residues shown in SEQ ID NO: 110, and | | | |
| | where b is greater than or equal to a + 14. | | | |
| 831014 | Preferably excluded from the present invention are one or more | | | |
| | polynucleotides comprising a nucleotide sequence described by the | | | |
| | general formula of a-b, where a is any integer between 1 to 4051 of | | | |
| | SEQ ID NO:111, b is an integer of 15 to 4065, where both a and b | | | |
| | correspond to the positions of nucleotide residues shown in SEQ ID | | | |
| | NO:111, and where b is greater than or equal to a + 14. | | | |
| 831026 | Preferably excluded from the present invention are one or more | | | |
| | polynucleotides comprising a aucleotide sequence described by the | | | |
| | general formula of a-b, where a is any integer between 1 to 1478 of | | | |
| | SEQ ID NO:112, b is an integer of 15 to 1492, where both a and b | | | |
| | correspond to the positions of nucleotide residues shown in SEQ ID | | | |
| | NO:112, and where b is greater than or equal to a + 14. | | | |
| 831031 | Preferably excluded from the present invention are one or more | R46004, R46004, 1106850, N27532, N30567, N30842, | | |
| | polynucleotides comprising a nucleotide sequence described by the | N34647, N40349, N41369, N49777, N52708, N62958, | | |
| | general formula of a-b, where a is any integer between 1 to 1468 of | W68355, W68490, AA054602, AA193410, AA193648, | | |
| | SEQ ID NO:113, b is an integer of 15 to 1482, where both a and b | AA503204, AA688236, AA730103, AA736540, AA747555, | | |
| | correspond to the positions of nucleotide residues shown in SEQ ID | AA811522, AA863169, N79861 | | |
| | NO:113, and where b is greater than or equal to a + 14. | | | |
| 831055 | Preferably excluded from the present invention are one or more | | | |
| | polynucleotides comprising a nucleotide sequence described by the | | | |
| | general formula of a-b, where a is any integer between 1 to 3717 of | | | |
| | SEQ ID NO:114, b is an integer of 15 to 3731, where both a and b | | | |
| | correspond to the positions of nucleotide residues shown in SEQ ID | | | |
| | NO:114, and where b is greater than or equal to a + 14. | | | |
| 831057 | Preferably excluded from the present invention are one or more | R69415, R69546, 1114127, H62767, N62927, N63320, | | |
| | polynucleotides comprising a nucleotide sequence described by the | W00649, W01189, AA053293, AA058396, AA149075, | | |
| | general formula of a-b, where a is any integer between 1 to 1301 of | AA458528, AA418699, AA418770, AA505598, AA576507, | | |
| | SEQ ID NO:115, b is an integer of 15 to 1315, where both a and b | AA730033, AA805864, A988279, AA991217, D82661, | | |
| | correspond to the positions of nucleotide residues shown in SEQ ID | C21298 | | |
| | NO:115, and where b is greater than or equal to a + 14. | | | |
| 831062 | Preferably excluded from the present invention are one or more | | | |
| | polynucleotides comprising a nucleotide sequence described by the | | | |
| | general formula of a-b, where a is any integer between 1 to 1306 of | | | |
| | SEQ ID NO:116, b is an integer of 15 to 1320, where both a and b | | | |
| | correspond to the positions of nucleotide residues shown in SEQ ID | | | |
| | NO:116, and where b is greater than or equal to a + 14. | | | |
| 831117 | Preferably excluded from the present invention are one or more | R80585, R80586, N49020, AA173625, AA173981, | | |
| | polynucleotides comprising a nucleotide sequence described by the | AA557142, AA627866, AA847195, AI015673 | | |
| | general formula of a-b, where a is any integer between 1 to 2011 of | | | |
| | SEQ ID NO:117, b is an integer of 15 to 2025, where both a and b | | | |
| | correspond to the positions of nucleotide residues shown in SEQ ID | | | |
| | NO:117, and where b is greater than or equal to a + 14. | | | |
| 831122 | Preferably excluded from the present invention are one or more | R72079, R72128, AA715820, AA804163, AA809123, | | |
| | polynucleotides comprising a nucleotide sequence described by the | AA641490 | | |
| | general formula of a-b, where a is any integer between 1 to 1281 of | | | |
| | SEQ ID NO:118, b is an integer of 15 to 1295, where both a and b | | | |
| | correspond to the positions of nucleotide residues shown in SEQ ID | | | |
| | NO:118, and where b is greater than or equal to a + 14. | | | |
| 831125 | Preferably excluded from the present invention are one or more | N80647, AA114140, AA143553, AA156386, N68188, | | |
| | polynucleotides comprising a nucleotide sequence described by the | AA070867 | | |
| | general formula of a-b, where a is any integer between 1 to 1243 of | | | |
| | SEQ ID NO:119, b is an integer of 15 to 1257, where both a and b | | | |
| | correspond to the positions of nucleotide residues shown in SEQ ID | | | |
| | NO:119, and where b is greater than or equal to a + 14. | | | |
| 831132 | Preferably excluded from the present invention are one or more | | | |
| | polynucleotides comprising a nucleotide sequence described by the | | | |
| | general formula of a-b, where a is any integer between 1 to 383 of SEQ | | | |
| | ID NO:120, b is an integer of 15 to 397, where both a and b correspond | | | |
| | to the positions of nucleotide residues shown in SEQ ID NO: 120, and | | | |
| | here b is greater than or equal to a + 14. | | | |
| 831152 | Preferably excluded from the present invention are one or more | A765155 | | |
| | polynucleotides comprising a nucleotide sequence described by the | | | |
| | general formula of a-b, where a is any integer between 1 to 862 of SEQ | | | |
| | ID NO:121, b is an integer of 15 to 876, where both a and b correspond | | | |
| | to the positions of nucleotide residues shown in SEQ ID NO: 121, and | | | |
| | here b is greater than or equal to a + 14. | | | |
| 831157 | Preferably excluded from the present invention are one or more | T57943, R34275, R35472, R77406, R77405, N23203, | | |
| | polynucleotides comprising a nucleotide sequence described by the | N59015, AA160841, AA610280, AA857624, A1089936, | | |
| | general formula of a-b, where a is any integer between 1 to 1264 of | AI094724, A1094954 | | |
| | SEQ ID NO: 122, his an integer of 15 to 1278, where both a and b | | | |
| | correspond to the positions of nucleotide residues shown in SEQ ID | | | |
| | NO:122, and where b is greater than or equal to a + 14. | | | |
| 831160 | Preferably excluded from the present invention are one or more | | | |
| | polynucleotides comprising a nucleotide sequence described by the | | | |
| | general formula of a-b, where a is any integer between 1 to 3101 of | | | |
| | SEQ ID NO:123, b is an integer of 15 to 3115, where both a and b | | | |
| | correspond to the positions of nucleotide residues shown in SEQ ID | | | |
| | NO:123, and where b is greater than or equal to a + 14. | | | |
| 831193 | Preferably excluded from the present invention are one or more | | | |
| | polynucleotides comprising a nucleotide sequence described by the | | | |
| | general formula of a-b, where a is any integer between 1 to 365 of SEQ | | | |
| | ID NO:124, b is an integer of 15 to 379, where both a and b correspond | | | |
| | to the positions of nucleotide residues shown in SEQ ID NO: 124, and | | | |
| | where b is greater than or equal to a + 14. | | | |
| 831197 | Preferably excluded from the present invention are one or more | A134613 | | |
| | polynucleotides comprising a nucleotide sequence described by the | | | |
| | general formula of a-b, where a is any integer between 1 to 1253 of | | | |
| | SEQ ID NO:125, b is an integer of 15 to 1267, where both a and b | | | |
| | correspond to the positions of nucleotide residues shown in SEQ ID | | | |
| | NO:125, and where b is greater than or equal to a + 14. | | | |
| 831217 | Preferably excluded from the present invention are one or more | | | |
| | polynucleotides comprising a nucleotide sequence described by the | | | |
| | general formula of a-b, where a is any integer between 1 to 827 of SEQ | | | |
| | ID NO:126, his an integer of 15 to 841, where both a and b correspond | | | |
| | to the positions of nucleotide residues shown in SEQ ID NO: 126, and | | | |
| | here b is greater than or equal to a + 14. | | | |
| 831239 | Preferably excluded from the present invention are one or more | T68487, T88923, T88994, R09550, R09663, R26714, | | |
| | polynucleotides comprising a nucleotide sequence described by the | R26937, H27046, H28228, H30272, H30335, N27966, | | |
| | general formula of a-b, where a is any integer between 1 to 1158 of | N36884, N46156, N93575, W21407, W44513, W44514, | | |
| | SEQ ID NO: 127, b is an integer of 15 to 1172, where both a and b | W47626, W47627, W56215, W60528, W80465, W80574, | | |
| | correspond to the positions of nucleotide residues shown in SEQ ID | W92729, AA002237, AA002076, AA099290, AA099291, | | |
| | NO:127, and where b is greater than or equal to a + 14. | A128572, AA148737, AA149497, AA419078, AA423819, | | |
| | | AA127753, AA127706, AA128275, AA506117, AA534694, | | |
| | AA552105, AA552219, AA583468, AA622094, AA633205, | | | |
| | | AA878663, AA911544, AA916173, AA974873, AA988860, | | |
| | | AA1056396, AA1074163, W92753 | | |
| 831248 | Preferably excluded from the present invention are one or more | | | |
| | polynucleotides comprising a nucleotide sequence described by the | | | |
| | general formula of a-b, where a is any integer between 1 to 877 of SEQ | | | |
| | ID NO:128, b is an integer of 15 to 891, where both a and b correspond | | | |
| | to the positions of nucleotide residues shown in SEQ ID NO: 128, and | | | |
| | where b is greater than or equal to a + 14. | | | |
| 831313 | Preferably excluded from the present invention are one or more | T61093, T97774, R13148, R31511, R32943, R33906, | | |
| | polynucleotides comprising a nucleotide sequence described by the | R33921, R37053, R44148, R44148, R74449, R79209, | | |
| | general formula of a-b, where a is any integer between 1 to 2447 of | R79476, H12271, H27631, H30122, R84834, H63166, | | |
| | SEQ ID NO:129, b is an integer of 15 to 2461, where both a and b | H71003, H71015, H83387, N23726, N23730, N23773, | | |
| | correspond to the positions of nucleotide residues shown in SEQ ID | N52416, N66497, N67917, N68137, N73801, N99428, | | |
| | NO:129, and where b is greater than or equal to a + 14. | W95944, AA018712, AA020879, AA429721, AA470397, | | |
| | | AA493243, AA507952, AA515358, AA583463, AA617991, | | |
| | | AA618186, AA631437, AA566089, AA746085, AA837997, | | |
| | | AA878863, AA922678, AA985597, AA947992, AI074096, | | |
| | | C03207, C17030, C18106 | | |
| 831369 | Preferably excluded from the present invention are one or more | | | |
| | polynucleotides comprising a nucleotide sequence described by the | | | |
| | general formula of a-b, where a is any integer between 1 to 2183 of | | | |
| | SEQ ID NO:130, b is an integer of 15 to 2197, where both a and b | | | |
| | correspond to the positions of nucleotide residues shown in SEQ ID | | | |
| | NO:130, and where b is greater than or equal to a + 14. | | | |
| 831371 | Preferably excluded from the present invention are one or more | | | |
| | polynucleotides comprising a nucleotide sequence described by the | | | |
| | general formula of a-b, where a is any integer between 1 to 450 of SEQ | | | |
| | ID NO:131, b is an integer of 15 to 464, where both a and b correspond | | | |
| | to the positions of nucleotide residues shown in SEQ ID NO:131, and | | | |
| | here b is greater than or equal to a + 14. | | | |
| 831373 | Preferably excluded from the present invention are one or more | T50786, T50949, T53797, T53916, T64650, T71681, | | |
| | polynucleotides comprising a nucleotide sequence described by the | T71836, T71876, T71877, T74596, T74656, H30426, | | |
| | general formula of a-b, where a is any integer between 1 to 1936 of | H46449, H46671, H46670, H46990, H50500, AA419051, | | |
| | SEQ ID NO:132, b is an integer of 15 to 1950, where both a and b | AA423809, AA928986 | | |
| | correspond to the positions of nucleotide residues shown in SEQ ID | | | |
| | NO:132, and where b is greater than or equal to a + 14. | | | |
| 831387 | Preferably excluded from the present invention are one or more | | | |
| | polynucleotides comprising a nucleotide sequence described by the | | | |
| | general formula of a-b, where a is any integer between 1 to 2079 of | | | |
| | SEQ ID NO:133, b is an integer of 15 to 2093, where both a and b | | | |
| | correspond to the positions of nucleotide residues shown in SEQ ID | | | |
| | NO:133, and where b is greater than or equal to a + 14. | | | |
| 831410 | Preferably excluded from the present invention are one or more | | | |
| | polynucleotides comprising a nucleotide sequence described by the | | | |
| | general formula of a-b, where a is any integer between 1 to 715 of SEQ | | | |
| | ID NO:134, b is an integer of 15 to 729, where both a and b correspond | | | |
| | to the positions of nucleotide residues shown in SEQ ID NO: 134, and | | | |
| | where b is greater than or equal to a + 14. | | | |
| 831448 | Preferably excluded from the present invention are one or more | | | |
| | polynucleotides comprising a nucleotide sequence described by the | | | |
| | general formula of a-b, where a is any integer between 1 to 1175 of | | | |
| | SEQ ID NO:135, b is an integer of 15 to 1189, where both a and b | | | |
| | correspond to the positions of nucleotide residues shown in SEQ ID | | | |
| | NO:135, and where b is greater than or equal to a + 14. | | | |
| 831450 | Preferably excluded from the present invention are one or more | | | |
| | polynucleotides comprising a nucleotide sequence described by the | | | |
| | general formula of a-b, where a is any integer between 1 to 1452 of | | | |
| | SEQ ID NO:136, b is an integer of 15 to 1466, where both a and b | | | |
| | correspond to the positions of nucleotide residues shown in SEQ ID | | | |
| | NO:136, and where b is greater than or equal to a + 14. | | | |
| 831472 | Preferably excluded from the present invention are one or more | | | |
| | polynucleotides comprising a nucleotide sequence described by the | | | |
| | general formula of a-b, where a is any integer between 1 to 126 of SEQ | | | |
| | ID NO:137, b is an integer of 15 to 140, where both a and b correspond | | | |
| | to the positions of nucleotide residues shown in SEQ ID NO: 137, and | | | |
| | where b is greater than or equal to a + 14. | | | |
| 831473 | Preferably excluded from the present invention are one or more | | | |
| | polynucleotides comprising a nucleotide sequence described by the | | | |
| | general formula of a-b, where a is any integer between 1 to 4128 of | | | |
| | SEQ ID NO:138, b is an integer of 15 to 4142, where both a and b | | | |
| | correspond to the positions of nucleotide residues shown in SEQ ID | | | |
| | NO:138, and where b is greater than or equal to a + 14. | | | |
| 831474 | Preferably excluded from the present invention are one or more | T66054, T89542, R10967, T78297, T83524, T97793, | | |
| | polynucleotides comprising a nucleotide sequence described by the | R13138, H08701, H10662, R82956, R96295, R98912, | | |
| | general formula of a-b, where a is any integer between 1 to 1733 of | H66237, H79525, N31425, N36736, W76142, W81053, | | |
| | SEQ ID NO:139, b is an integer of 15 to 1747, where both a and b | AA010227, AA011652, AA057613, AA057653, AA069088, | | |
| | correspond to the positions of nucleotide residues shown in SEQ ID | AA083946, AA084193, AA126186, H70618, H79526, | | |
| | NO:139, and where b is greater than or equal to a + 14. | W72916, W80802, AA011433, AA057699, AA057752, | | |
| | | AA069023 | | |
| 831494 | Preferably excluded from the present invention are one or more | H14081, H14102, N34979, N42213, N43740, N68241, | | |
| | polynucleotides comprising a nucleotide sequence described by the | W69584, W69583, AA507828, AA877181, AA975100, | | |
| | general formula of a-b, where a is any integer between 1 to 1226 of | AI000204 | | |
| | SEQ ID NO:140, b is an integer of 15 to 1240, where both a and b | | | |
| | correspond to the positions of nucleotide residues shown in SEQ ID | | | |
| | NO:140, and where b is greater than or equal to a + 14. | | | |
| 831506 | Preferably excluded from the present invention are one or more | AA035596, AA577792, AA903617, AA972775, | | |
| | polynucleotides comprising a nucleotide sequence described by the | AA996054, C00084 | | |
| | general formula of a-b, where a is any integer between 1 to 657 of SEQ | | | |
| | ID NO: 141, b is an integer of 15 to 671, where both a and b correspond | | | |
| | to the positions of nucleotide residues shown in SEQ ID NO: 141, and | | | |
| | here b is greater than or equal to a + 14. | | | |
| 831533 | Preferably excluded from the present invention are one or more | | | |
| | polynucleotides comprising a nucleotide sequence described by the | | | |
| | general formula of a-b, where a is any integer between 1 to 3251 of | | | |
| | SEQ ID NO:142, b is an integer of 15 to 3265, where both a and b | | | |
| | correspond to the positions of nucleotide residues shown in SEQ ID | | | |
| | NO:142, and where b is greater than or equal to a + 14. | | | |
| 831539 | Preferably excluded from the present invention are one or more | | | |
| | polynucleotides comprising a nucleotide sequence described by the | | | |
| | general formula of a-b, where a is any integer between 1 to 751 of SEQ | | | |
| | ID NO:143, b is an integer of 15 to 765, where both a and b correspond | | | |
| | to the positions of nucleotide residues shown in SEQ ID NO: 143, and | | | |
| | where b is greater than or equal to a + 14. | | | |
| 831556 | Preferably excluded from the present invention are one or more | H01879, HO1880, H43546, H43547, H43548, N58813, | | |
| | polynucleotides comprising a nucleotide sequence described by the | N75148, AA428902, AA429101, AA278337, AA662009, | | |
| | general formula of a-b, where a is any integer between 1 to 1680 of | AA928907, AA988624 | | |
| | SEQ ID NO:144, b is an integer of 15 to 1694, where both a and b | | | |
| | correspond to the positions of nucleotide residues shown in SEQ ID | | | |
| | NO:144, and where b is greater than or equal to a + 14. | | | |
| 831594 | Preferably excluded from the present invention are one or more | | | |
| | polynucleotides comprising a nucleotide sequence described by the | | | |
| | general formula of a-b, where a is any integer between 1 to 809 of SEQ | | | |
| | ID NO: 145, b is an integer of 15 to 823, where both a and b correspond | | | |
| | to the positions of nucleotide residues shown in SEQ ID NO: 145, and | | | |
| | where b is greater than or equal to a + 14. | | | |
| 831598 | Preferably excluded from the present invention are one or more | | | |
| | polynucleotides comprising a nucleotide sequence described by the | | | |
| | general formula of a-b, where a is any integer between 1 to 1120 of | | | |
| | SEQ ID NO:146, b is an integer of 15 to 1134, where both a and b | | | |
| | correspond to the positions of nucleotide residues shown in SEQ ID | | | |
| | NO:146, and where b is greater than or equal to a + 14. | | | |
| 831608 | Preferably excluded from the present invention are one or more | | | |
| | polynucleotides comprising a nucleotide sequence described by the | | | |
| | general formula of a-b, where a is any integer between 1 to 1472 of | | | |
| | SEQ ID NO:147, b is an integer of 15 to 1486, where both a and b | | | |
| | correspond to the positions of nucleotide residues shown in SEQ ID | | | |
| | NO:147, and where b is greater than or equal to a + 14. | | | |
| 831613 | Preferably excluded from the present invention are one or more | | | |
| | polynucleotides comprising a nucleotide sequence described by the | | | |
| | general formula of a-b, where a is any integer between 1 to 139 of SEQ | | | |
| | ID NO: 148, b is an integer of 15 to 153, where both a and b correspond | | | |
| | to the positions of nucleotide residues shown in SEQ ID NO: 148, and | | | |
| | here b is greater than or equal to a + 14. | | | |
| 831622 | Preferably excluded from the present invention are one or more | T40013, T40117, T55842, T55892, T58738, T58764, | | |
| | polynucleotides comprising a nucleotide sequence described by the | T58805, T58835, T58963, T60293, T60386, T61270, | | |
| | general formula of a-b, where a is any integer between 1 to 868 of SEQ | T61322, T61371, T61395, T61404, T61721, T61734, | | |
| | ID NO:149, b is an integer of 15 to 882, where both a and b correspond | T61735, T61841, T61856, T61857, T61884, T62049, | | |
| | to the positions of nucleotide residues shown in SEQ ID NO: 149, and | T62065, T62070, T62087, T62113, T62126, T62146, | | |
| | where b is greater than or equal to a + 14. | T41021, T62664, T62668, T62669, T62676, T62816, | | |
| | | T62819, T62820, T62827, T64118, T64230, T64368, | | |
| | | T64422, T64678, T64698, T64747, T67429, T67590, | | |
| | | T67709, T67724, T67754, T67785, T67831, T67863, | | |
| | | | | T67888, T67996, T68022, T68038, T68104, T68142, |
| T68217, T68418, T68465, T68484, T68531, T68548, | | | | |
| | | T68557, T68575, T68623, T68633, T68648, T68653, | | |
| | | T68760, T68826, T68895, T68969, T68981, T69056, | | |
| | | T69126, T69184, T69428, T69605, T69622, T69678, | | |
| | | T69699, T70483, T70907, T70960, T71019, T71080, | | |
| | | T71224, T71297, T71437, T71660, T71885, T71903, | | |
| | | T71985, T72050, T72115, T72129, T72147, T72158, | | |
| | | T72263, T72310, T72415, T72769, T72775, T72802, | | |
| | | T72897, T72903, T72922, T72924, T73035, T73068, | | |
| T73167, T73224, T73305, T73392, T73458, T73473, | | | | |
| | | T73482, T73525, T73540, T73541, T73551, T73560, | | |
| | | T73599, T73606, T73619, T73637, T73644, T73655, | | |
| | | T73659, T73660, T73800, T73887, T73913, T73945, | | |
| | | T73950, T74048, T74200, T74201, T74423, T74477, | | |
| | | T74559, T74706, T74827, T99112, R05781, R05867, | | |
| | | H47944, R95831, H60131, H65347, H65551, H68454, | | |
| | | H68777, H73380, H73381, H79275, H79386, H82213, | | |
| | | H82307, H93202, H93992, H93991, H94491, H94804, | | |
| | | H95257, H95307, H95341, N28274, N58244, N68733, | | |
| | | N77623, N80767, N91623, W07555, W80697, | | |
| | | AA004677, AA004255, AA033869, AA034057, | | |
| | | AA234464, A491842, C20927 | | |
| 831631 | Preferably excluded from the present invention are one or more | | | |
| | polynucleotides comprising a nucleotide sequence described by the | | | |
| | general formula of a-b, where a is any integer between 1 to 1494 of | | | |
| | SEQ ID NO:150, b is an integer of 15 to 1508, where both a and b | | | |
| | correspond to the positions of nucleotide residues shown in SEQ ID | | | |
| | NO:150, and where b is greater than or equal to a + 14. | | | |
| 831632 | Preferably excluded from the present invention are one or more | T60158, T60218, T62213, T62652, T62877, T62966, | | |
| | polynucleotides comprising a nucleotide sequence described by the | T63329, T63951, T64542, T64634, T65965, T90119, | | |
| | general formula of a-b, where a is any integer between 1 to 1218 of | T91565, T91610, T92138, T94160, T94999, T90219, | | |
| | SEQ ID NO:151, b is an integer of 15 to 1232, where both a and b | T83025, T84028, T84029, T84511, R22325, R22619, | | |
| | correspond to the positions of nucleotide residues shown in SEQ ID | R22620, R25250, R25595, R26992, R27328, R32850, | | |
| | NO:151, and where b is greater than or equal to a + 14. | R32954,R33282, R44282, R47779, R48151, R48152, | | |
| | | R48322, R48428 R48538, R50415, R52277, R52278, | | |
| | | R54608, R44282, R55376, R70352, R72103, R72155, | | |
| | | R72280, R72317, R72367, R72368, R72371, R72372, | | |
| | | R72716, R73784, R74375, R77393, R77394, R77892, | | |
| | | R77987, R81485, R81725, H05676, H15941, H22149, | | |
| | | H22193, H24533, H25059, H26810, H27743, H27803, | | |
| | | H28012, H28066, H28290, H28291, HH30654, | | |
| | | H39748, H39761, H41932, H41979, H42063, H42642, | | |
| | | H42766, H42767, H44628, H45776, H45777, H46386, | | |
| | | H46404, R93135, R93942, R94660, R94661, | | |
| | | H50708, H50709, H50720, H50812, H50811, H50826, | | |
| | | H61352, H62379, H63665, H63944, H66336, H66385, | | |
| | | H70746, H73887, H74080, H74176, H82646, H82647, | | |
| | | H86555, H87065, H87719, H91147, H91197, H93078, | | |
| | | H93211, H98788, N24993, N25111, N30229, N32159, | | |
| | | N34033, N36553, N41829, N42292, N46951, | | |
| | | N49340, N52921, N55462, N57121, N69863, N76837, | | |
| | | N80667, N92844, N93333, N93683, N94449, N95075, | | |
| | | W16427, W15325, W23470, W23480, W25070, W25186, | | |
| | | W30795, W38675, W39219, W39393, W69270, W69557, | | |
| | | AA019864, AA022662, AA022669, AA022768, | | |
| | | AA025335, AA024417, AA031282, AA031281, | | |
| | | AA032192, AA039752, AA040328, AA040307, | | |
| | | AA041359, AA041442, AA057720, AA074855, | | |
| | | AA086192, AA099717, AA099716, AA100416, | | |
| | | AA142927, AA143150, AA149895, AA150239, | | |
| | | AA150313, AA176193, AA459294, AA464165, | | |
| | | AA425845, AA425899, AA428397, AA430393, | | |
| | | AA427364, AA469113, AA505259, AA515918, | | |
| | | AA516032, AA527677, AA533908, AA541266, | | |
| | | AA554671, AA555247, AA557794, AA565267, | | |
| | | AA582247, AA584415, AA588477, AA593255, | | |
| | | AA595311, AA595376, AA604354, AA622137, | | |
| | | AA573444, AA574244, AA732469, AA740323, | | |
| | | AA741360, AA742872, AA749432, AA807903, | | |
| | | AA808285, AA872498, AA873181, AA878139, | | |
| | | AA878294, AA909748, AA937058, AA987672, | | |
| | | A994225, A1076066, W07696 | | |
| 831653 | Preferably excluded from the present invention are one or more | | | |
| | polynucleotides comprising a nucleotide sequence described by the | | | |
| | general formula of a-b, where a is any integer between 1 to 985 of SEQ | | | |
| | ID NO: 152, b is an integer of 15 to 999, where both a and b corre- | | | |
| | spond to the positions of nucleotide residues shown in SEQ ID NO: | | | |
| | 152, and where b is greater than or equal to a + 14. | | | |
| 831655 | Preferably excluded from the present invention are one or more | N95539, W24228, W37689, AA019086, AA430215 | | |
| | polynucleotides comprising a nucleotide sequence described by the | | | |
| | general formula of a-b, where a is any integer between 1 to 1198 of | | | |
| | SEQ ID NO:153, b is an integer of 15 to 1212, where both a and b | | | |
| | correspond to the positions of nucleotide residues shown in SEQ ID | | | |
| | NO:153, and where b is greater than or equal to a + 14. | | | |
| 831708 | Preferably excluded from the present invention are one or more | | | |
| | polynucleotides comprising a nucleotide sequence described by the | | | |
| | general formula of a-b, where a is any integer between 1 to 2347 of | | | |
| | SEQ ID NO:154, b is an integer of 15 to 2361, where both a and b | | | |
| | correspond to the positions of nucleotide residues shown in SEQ ID | | | |
| | NO:154, and where b is greater than or equal to a + 14. | | | |
| 831738 | Preferably excluded from the present invention are one or more | | | |
| | polynucleotides comprising a nucleotide sequence described by the | | | |
| | general formula of a-b, where a is any integer between 1 to 1817 of | | | |
| | SEQ ID NO:155, b is an integer of 15 to 1831, where both a and b | | | |
| | correspond to the positions of nucleotide residues shown in SEQ ID | | | |
| | NO:155, and where b is greater than or equal to a + 14. | | | |
| 831741 | Preferably excluded from the present invention are one or more | T47689, T80213, H11356, H13411, R86865, R87546, | | |
| | polynucleotides comprising a nucleotide sequence described by the | N35663, AA081442, AA161001, C17978, C18946 | | |
| | general formula of a-b, where a is any integer between 1 to 1172 of | | | |
| | SEQ ID NO: 156, b is an integer of 15 to 1186, where both a and b | | | |
| | correspond to the positions of nucleotide residues shown in SEQ ID | | | |
| | NO:156, and where b is greater than or equal to a + 14. | | | |
| 831754 | Preferably excluded from the present invention are one or more | | | |
| | polynucleotides comprising a nucleotide sequence described by the | | | |
| | general formula of a-b, where a is any integer between 1 to 1434 of | | | |
| | SEQ ID NO: 157, b is an integer of 15 to 1448, where both a and b | | | |
| | correspond to the positions of nucleotide residues shown in SEQ ID | | | |
| | NO:157, and where b is greater than or equal to a + 14. | | | |
| 831760 | Preferably excluded from the present invention are one or more | R73907, R74000, N64405, AA196765, AA232516, | | |
| | polynucleotides comprising a nucleotide sequence described by the | AA806432, A837776, AI017699 | | |
| | general formula of a-b, where a is any integer between 1 to 990 of SEQ | | | |
| | ID NO:158, b is an integer of 15 to 1004, where both a and b | | | |
| | correspond to the positions of nucleotide residues shown in SEQ ID | | | |
| | NO:158, and where b is greater than or equal to a + 14. | | | |
| 831780 | Preferably excluded from the present invention are one or more | AA100654, AA112750, AA594472, AA731487 | | |
| | polynucleotides comprising a nucleotide sequence described by the | | | |
| | general formula of a-b, where a is any integer between 1 to 1495 of | | | |
| | SEQ ID NO:159, b is an integer of 15 to 1509, where both a and b | | | |
| | correspond to the positions of nucleotide residues shown in SEQ ID | | | |
| | NO:159, and where b is greater than or equal to a + 14. | | | |
| 831796 | Preferably excluded from the present invention are one or more | H14891, W74005, AA623010, D80585, | | |
| | polynucleotides comprising a nucleotide sequence described by the | AI096496, W38434 | | |
| | general formula of a-b, where a is any integer between 1 to 2146 of | | | |
| | SEQ ID NO:160, b is an integer of 15 to 2160, where both a and b | | | |
| | correspond to the positions of nucleotide residues shown in SEQ ID | | | |
| | NO:160, and where b is greater than or equal to a + 14. | | | |
| 831800 | Preferably excluded from the present invention are one or more | | | |
| | polynucleotides comprising a nucleotide sequence described by the | | | |
| | general formula of a-b, where a is any integer between 1 to 3595 of | | | |
| | SEQ ID NO:161, b is an integer of 15 to 3609, where both a and b | | | |
| | correspond to the positions of nucleotide residues shown in SEQ ID | | | |
| | NO:161, and where b is greater than or equal to a + 14. | | | |
| 831807 | Preferably excluded from the present invention are one or more | | | |
| | polynucleotides comprising a nucleotide sequence described by the | | | |
| | general formula of a-b, where a is any integer between 1 to 1589 of | | | |
| | SEQ ID NO:162, b is an integer of 15 to 1603, where both a and b | | | |
| | correspond to the positions of nucleotide residues shown in SEQ ID | | | |
| | NO:162, and where b is greater than or equal to a + 14. | | | |
| 831812 | Preferably excluded from the present invention are one or more | | | |
| | polynucleotides comprising a nucleotide sequence described by the | | | |
| | general formula of a-b, where a is any integer between 1 to 839 of SEQ | | | |
| | ID NO:163, b is an integer of 15 to 853, where both a and b correspond | | | |
| | to the positions of nucleotide residues shown in SEQ ID NO: 163, and | | | |
| | where b is greater than or equal to a + 14. | | | |
| 831813 | Preferably excluded from the present invention are one or more | H14269, AA0692 13, AA808661 | | |
| | polynucleotides comprising a nucleotide sequence described by the | | | |
| | general formula of a-b, where a is any integer between 1 to 1903 of | | | |
| | SEQ ID NO:164, b is an integer of 15 to 1917, where both a and b | | | |
| | correspond to the positions of nucleotide residues shown in SEQ ID | | | |
| | NO:164, and where b is greater than or equal to a + 14. | | | |
| 831830 | Preferably excluded from the present invention are one or more | H04695, AA112742, AA251641, AA506539 | | |
| | polynucleotides comprising a nucleotide sequence described by the | | | |
| | general formula of a-b, where a is any integer between 1 to 2406 of | | | |
| | SEQ ID NO:165, b is an integer of 15 to 2420, where both a and b | | | |
| | correspond to the positions of nucleotide residues shown in SEQ ID | | | |
| | NO:165, and where b is greater than or equal to a + 14. | | | |
| 831860 | Preferably excluded from the present invention are one or more | | | |
| | polynucleotides comprising a nucleotide sequence described by the | | | |
| | general formula of a-b, where a is any integer between 1 to 2047 of | | | |
| | SEQ ID NO:166, b is an integer of 15 to 2061, where both a and b | | | |
| | correspond to the positions of nucleotide residues shown in SEQ ID | | | |
| | NO:166, and where b is greater than or equal to a + 14. | | | |
| 831872 | Preferably excluded from the present invention are one or more | R15368, R36227, R36228, R36669, R39751, H12331, | | |
| | polynucleotides comprising a nucleotide sequence described by the | H12382, H47986, R84945, R97224, R97223, W78107, | | |
| | general formula of a-b, where a is any integer between 1 to 2553 of | AA149874, AA193466, A193348, AA287444, AA535607, | | |
| | SEQ ID NO:167, b is an integer of 15 to 2567, where both a and b | AA687414, AA689396, A748665, AA809715 | | |
| | correspond to the positions of nucleotide residues shown in SEQ ID | | | |
| | NO:167, and where b is greater than or equal to a + 14. | | | |
| 831896 | Preferably excluded from the present invention are one or more | R59635, N28389, AA158646, AA158659, AA188594, | | |
| | polynucleotides comprising a nucleotide sequence described by the | AA190705, A459426, AA465652 | | |
| | general formula of a-b, where a is any integer between 1 to 2310 of | | | |
| | SEQ ID NO:168, b is an integer of 15 to 2324, where both a and b | | | |
| | correspond to the positions of nucleotide residues shown in SEQ ID | | | |
| | NO:168, and where b is greater than or equal to a + 14. | | | |
| 831928 | Preferably excluded from the present invention are one or more | | | |
| | polynucleotides comprising a nucleotide sequence described by the | | | |
| | general formula of a-b, where a is any integer between 1 to 1770 of | | | |
| | SEQ ID NO:169, b is an integer of 15 to 1784, where both a and b | | | |
| | correspond to the positions of nucleotide residues shown in SEQ ID | | | |
| | NO:169, and where b is greater than or equal to a + 14. | | | |
| 831949 | Preferably excluded from the present invention are one or more | | | |
| | polynucleotides comprising a nucleotide sequence described by the | | | |
| | general formula of a-b, where a is any integer between 1 to 1282 of | | | |
| | SEQ ID NO:170, b is an integer of 15 to 1296, where both a and b | | | |
| | correspond to the positions of nucleotide residues shown in SEQ ID | | | |
| | NO:170, and where b is greater than or equal to a + 14. | | | |
| 831950 | Preferably excluded from the present invention are one or more | | | |
| | polynucleotides comprising a nucleotide sequence described by the | | | |
| | general formula of a-b, where a is any integer between 1 to 1883 of | | | |
| | SEQ ID NO: 171, b is an integer of 15 to 1897, where both a and b | | | |
| | correspond to the positions of nucleotide residues shown in SEQ ID | | | |
| | NO:171, and where b is greater than or equal to a + 14. | | | |
| 831953 | Preferably excluded from the present invention are one or more | | | |
| | polynucleotides comprising a nucleotide sequence described by the | | | |
| | general formula of a-b, where a is any integer between 1 to 1709 of | | | |
| | SEQ ID NO:172, b is an integer of 15 to 1723, where both a and b | | | |
| | correspond to the positions of nucleotide residues shown in SEQ ID | | | |
| | NO:172, and where b is greater than or equal to a + 14. | | | |
| 831975 | Preferably excluded from the present invention are one or more | | | |
| | polynucleotides comprising a nucleotide sequence described by the | | | |
| | general formula of a-b, where a is any integer between 1 to 1402 of | | | |
| | SEQ ID NO:173, b is an integer of 15 to 1416, where both a and b | | | |
| | correspond to the positions of nucleotide residues shown in SEQ ID | | | |
| | NO:173, and where b is greater than or equal to a + 14. | | | |
| 832036 | Preferably excluded from the present invention are one or more | R60820, R78776, R79082, H01912, H04427, N34789, | | |
| | polynucleotides comprising a nucleotide sequence described by the | N44513, W20183, W35150, AA159701, AA159628, | | |
| | general formula of a-b, where a is any integer between 1 to 1942 of | AA470753, AA659808 | | |
| | SEQ ID NO: 174, b is an integer of 15 to 1956, where both a and b | | | |
| | correspond to the positions of nucleotide residues shown in SEQ ID | | | |
| | NO:174, and where b is greater than or equal to a + 14. | | | |
| 832047 | Preferably excluded from the present invention are one or more | R21952, R21968, R26963, R78028, H75703, H75632, | | |
| | polynucleotides comprising a nucleotide sequence described by the | H84015, H88136, H88135, H94007, H95012, N24834, | | |
| | general formula of a-b, where a is any integer between 1 to 1675 of | N30818, N31761, N41592, N79533, W16686, W24639, | | |
| | SEQ ID NO:175, b is an integer of 15 to 1689, where both a and b | W38979, W87777, W87875, AA121146, AA122426, | | |
| | correspond to the positions of nucleotide residues shown in SEQ ID | AA131874, AA131978, AA147083, AA147140, AA282507, | | |
| | NO:175, and where b is greater than or equal to a + 14. | AA282605, AA558945, H84016, AA587558, A830662, | | |
| | | AA866026, AA917653, AI017813, C06340 | | |
| 832078 | Preferably excluded from the present invention are one or more | | | |
| | polynucleotides comprising a nucleotide sequence described by the | | | |
| | general formula of a-b, where a is any integer between 1 to 1002 of | | | |
| | SEQ ID NO:176, b is an integer of 15 to 1016, where both a and b | | | |
| | correspond to the positions of nucleotide residues shown in SEQ ID | | | |
| | NO:176, and where b is greater than or equal to a + 14. | | | |
| 832100 | Preferably excluded from the present invention are one or more | | | |
| | polynucleotides comprising a nucleotide sequence described by the | | | |
| | general formula of a-b, where a is any integer between 1 to 1350 of | | | |
| | SEQ ID NO:177, b is an integer of 15 to 1364, where both a and b | | | |
| | correspond to the positions of nucleotide residues shown in SEQ ID | | | |
| | NO:177, and where b is greater than or equal to a + 14. | | | |
| 832104 | Preferably excluded from the present invention are one or more | | | |
| | polynucleotides comprising a nucleotide sequence described by the | | | |
| | general formula of a-b, where a is any integer between 1 to 726 of SEQ | | | |
| | ID NO: 178, b is an integer of 15 to 740, where both a and b correspond | | | |
| | to the positions of nucleotide residues shown in SEQ ID NO: 178, and | | | |
| | here b is greater than or equal to a + 14. | | | |
| 832268 | Preferably excluded from the present invention are one or more | | | |
| | polynucleotides comprising a nucleotide sequence described by the | | | |
| | general formula of a-b, where a is any integer between 1 to 1396 of | | | |
| | SEQ ID NO:179, b is an integer of 15 to 1410, where both a and b | | | |
| | correspond to the positions of nucleotide residues shown in SEQ ID | | | |
| | NO:179, and where b is greater than or equal to a + 14. | | | |
| 832270 | Preferably excluded from the present invention are one or more | | | |
| | polynucleotides comprising a nucleotide sequence described by the | | | |
| | general formula of a-b, where a is any integer between 1 to 1479 of | | | |
| | SEQ ID NO:180, b is an integer of 15 to 1493, where both a and b | | | |
| | correspond to the positions of nucleotide residues shown in SEQ ID | | | |
| | NO:180, and where b is greater than or equal to a + 14. | | | |
| 832279 | Preferably excluded from the present invention are one or more | | | |
| | polynucleotides comprising a nucleotide sequence described by the | | | |
| | general formula of a-b, where a is any integer between 1 to 2026 of | | | |
| | SEQ ID NO:181, b is an integer of 15 to 2040, where both a and I, | | | |
| | correspond to the positions of nucleotide residues shown in SEQ ID | | | |
| | NO:181, and where b is greater than or equal to a + 14. | | | |
| 832317 | Preferably excluded from the present invention are one or more | R81508, H12476, H86945, AA053747, AA115783, | | |
| | polynucleotides comprising a nucleotide sequence described by the | AA133749, AA134163, AA134164, AA224985, | | |
| | general formula of a-b, where a is any integer between 1 to 955 of SEQ | AA228334, AA228423, AA229297, AA640471, | | |
| | ID NO:182, b is an integer of 15 to 969, where both a and b correspond | AA657793, AA687568, AA904162, A983632 | | |
| | to the positions of nucleotide residues shown in SEQ ID NO: 182, and | | | |
| | where b is greater than or equal to a + 14. | | | |
| 832354 | Preferably excluded from the present invention are one or more | | | |
| | polynucleotides comprising a nucleotide sequence described by the | | | |
| | general formula of a-b, where a is any integer between 1 to 1438 of | | | |
| | SEQ ID NO:183, b is an integer of 15 to 1452, where both a and b | | | |
| | correspond to the positions of nucleotide residues shown in SEQ ID | | | |
| | NO:183, and where b is greater than or equal to a + 14. | | | |
| 832364 | Preferably excluded from the present invention are one or more | | | |
| | polynucleotides comprising a nucleotide sequence described by the | | | |
| | general formula of a-b, where a is any integer between 1 to 2105 of | | | |
| | SEQ ID NO:184, b is an integer of 15 to 2119, where both a and b | | | |
| | correspond to the positions of nucleotide residues shown in SEQ ID | | | |
| | NO:184, and where b is greater than or equal to a + 14. | | | |
| 832378 | Preferably excluded from the present invention are one or more | | | |
| | polynucleotides comprising a nucleotide sequence described by the | | | |
| | general formula of a-b, where a is any integer between 1 to 1311 of | | | |
| | SEQ ID NO:185, b is an integer of 15 to 1325, where both a and b | | | |
| | correspond to the positions of nucleotide residues shown in SEQ ID | | | |
| | NO:185, and where b is greater than or equal to a + 14. | | | |
| 832385 | Preferably excluded from the present invention are one or more | | | |
| | polynucleotides comprising a nucleotide sequence described by the | | | |
| | general formula of a-b, where a is any integer between 1 to 419 of SEQ | | | |
| | ID NO:186, b is an integer of 15 to 433, where both a and b correspond | | | |
| | to the positions of nucleotide residues shown in SEQ ID NO: 186, and | | | |
| | where b is greater than or equal to a + 14. | | | |
| 832428 | Preferably excluded from the present invention are one or more | AA031420 | | |
| | polynucleotides comprising a nucleotide sequence described by the | | | |
| | general formula of a-b, where a is any integer between 1 to 845 of SEQ | | | |
| | ID NO:187, b is an integer of 15 to 859, where both a and b correspond | | | |
| | to the positions of nucleotide residues shown in SEQ ID NO: 187, and | | | |
| | here b is greater than or equal to a + 14. | | | |
| 832485 | Preferably excluded from the present invention are one or more | R63025, R66741, H53264, H53265, H53769, H53822, | | |
| | polynucleotides comprising a nucleotide sequence described by the | H54405, H54489, H81182, H91282, AA526672, H81181 | | |
| | general formula of a-b, where a is any integer between 1 to 819 of SEQ | | | |
| | ID NO:188, b is an integer of 15 to 833, where both a and b correspond | | | |
| | to the positions of nucleotide residues shown in SEQ ID NO: 188, and | | | |
| | here b is greater than or equal to a + 14. | | | |
| 832494 | Preferably excluded from the present invention are one or more | T61040, T61591, T90055, T90157, T92840, T93714, | | |
| | polynucleotides comprising a nucleotide sequence described by the | T96177, T77726, H04686, H05450, H06997, H20176, | | |
| | general formula of a-b, where a is any integer between 1 to 2197 of | H20366, R92666, H65144, H92413, N64053, N64060, | | |
| | SEQ ID NO: 189, b is an integer of 15 to 2211, where both a and b | N66714, N71338, N71388, N79742, N5497, N99884, | | |
| | correspond to the positions of nucleotide residues shown in SEQ ID | W07259, W24989, W37394, W37657, W40208,W40260, | | |
| | NO:189, and where b is greater than or equal to a + 14. | W40532, W45430, W56165, W60427, W60986, W61080, | | |
| | | W63739, W72328, W73757, W74394, AA025512, AA026057, | | |
| | | AA065019, AA069295, AA069798, AA069845, AA070441, | | |
| | | AA075793, AA083393, AA083394, AA084576, AA086181, | | |
| | | AA099019, AA099097, AA099493, AA102003, AA100395, | | |
| | | AA100554, AA100555, AA100638, AA101578, AA113226, | | |
| | | AA113811, AA115645, AA115646, AA115888, AA115889, | | |
| | | AA122231, AA121108, AA121596, AA121671, AA121743, | | |
| | | AA126075, AA126102, AA126181, AA126295, AA126404, | | |
| | | AA129470, AA129665, AA133945, AA133946, AA146752, | | |
| | | AA155947, AA157140, AA157228, AA159947, AA160900, | | |
| | | AA164889, AA164890, AA164840, AA164839, AA172107, | | |
| | | AA182040, AA171714, AA187244, AA187376, AA186418, | | |
| | | AA188846, AA189131, AA196155, AA196257, AA196611, | | |
| | | AA196789, AA196961, AA223 155, AA223415, AA2268 16, | | |
| | | AA226856, AA227026, AA227109, AA227208, AA243161, | | |
| | | AA243205, AA428759, AA429347, AA5 14858, AA535250, | | |
| | | AA555125, AA565075, AA565168, AA581531, AA587192, | | |
| | | AA576761, AA580523, AA659699, AA688240, AA689484, | | |
| | | AA689543, AA689313, AA729979, AA740203, AA747258, | | |
| | | AA747399, AA747993, AA837961, AA865930, AA906561, | | |
| | | AA910350, AA919085, AA931143, AA999884, AI051141, | | |
| | | F19298, W22294, W22759, W22970, W25820, W73709, | | |
| | | C02713, C02766, C03390, C03613, C04202, C05262, | | |
| | | C05272, R28954, R29028, | | |
| | | R29032, AA062628, AA090039, C18989 | | |
| 832512 | Preferably excluded from the present invention are one or more | | | |
| | polynucleotides comprising a nucleotide sequence described by the | | | |
| | general formula of a-b, where a is any integer between 1 to 1645 of | | | |
| | SEQ ID NO:190, b is an integer of 15 to 1659, where both a and b | | | |
| | correspond to the positions of nucleotide residues shown in SEQ ID | | | |
| | NO:190, and where b is greater than or equal to a + 14. | | | |
| 832515 | Preferably excluded from the present invention are one or more | | | |
| | polynucleotides comprising a nucleotide sequence described by the | | | |
| | general formula of a-b, where a is any integer between 1 to 3880 of | | | |
| | SEQ ID NO: 191, b is an integer of 15 to 3894, where both a and b | | | |
| | correspond to the positions of nucleotide residues shown in SEQ ID | | | |
| | NO:191, and where b is greater than or equal to a + 14. | | | |
| 832526 | Preferably excluded from the present invention are one or more | | | |
| | polynucleotides comprising a nucleotide sequence described by the | | | |
| | general formula of a-b, where a is any integer between 1 to 681 of SEQ | | | |
| | ID NO: 192, b is an integer of 15 to 695, where both a and b correspond | | | |
| | to the positions of nucleotide residues shown in SEQ ID NO: 192, and | | | |
| | where b is greater than or equal to a + 14. | | | |
| 832575 | Preferably excluded from the present invention are one or more | R28543, R28684, R55782, R55862, R62797, R62843, | | |
| | polynucleoticles comprising a nucleotide sequence described by the | R67670, R71154, R71651, N20642, N24838, N25562, | | |
| | general formula of a-b, where a is any integer between 1 to 3117 of | N29014, N31768, N34161, N57560, N72111, W00338, | | |
| | SEQ ID NO:193, b is an integer of 15 to 3131, where both a and b | W00374, W30889, W52729, W59982, W68047, W68189, | | |
| | correspond to the positions of nucleotide residues shown in SEQ ID | AA019459, AA043870, AA044336, AA045040, AA045041, | | |
| | NO:193, and where b is greater than or equal to a + 14. | AA115599, AA115134, AA131177, AA165259, AA165260, | | |
| | | AA165191, AA165192, AA164549, AA164550, AA261988, | | |
| | | AA424972, AA279863, AA458832, | | |
| | | AA459024, AA5O5193, AA507542, AA514388, AA622542, | | |
| | | AA689232, AA689233, AA804910, AA807169, AA832321, | | |
| | | AA878091, AA904023, AA936069, AA936071, AA946621, | | |
| | | C00143, N86645, AA010988, AA641236, AA641464, | | |
| | | C18301 | | |
| 832576 | Preferably excluded from the present invention are one or more | | | |
| | polynucleotides comprising a nucleotide sequence described by the | | | |
| | general formula of a-b, where a is any integer between 1 to 2044 of | | | |
| | SEQ ID NO:194, b is an integer of 15 to 2058, where both a and b | | | |
| | correspond to the ositions of nucleotide residues shown in SEQ ID | | | |
| | NO:194, and where b is greater than or equal to a + 14. | | | |
| 832588 | Preferably excluded from the present invention are one or more | | | |
| | polynucleotides comprising a nucleotide sequence described by the | | | |
| | general formula of a-b, where a is any integer between 1 to 817 of SEQ | | | |
| | ID NO:195, b is an integer of 15 to 831, where both a and b correspond | | | |
| | to the positions of nucleotide residues shown in SEQ ID NO: 195, and | | | |
| | where b is greater than or equal to a + 14. | | | |
| 832634 | Preferably excluded from the present invention are one or more | | | |
| | polynucleotides comprising a nucleotide sequence described by the | | | |
| | general formula of a-b, where a is any integer between 1 to 947 of SEQ | | | |
| | ID NO: 196, b is an integer of 15 to 961, where both a and b correspond | | | |
| | to the positions of nucleotide residues shown in SEQ ID NO: 196, and | | | |
| | here b is greater than or equal to a + 14. | | | |
| 832728 | Preferably excluded from the present invention are one or more | | | |
| | polynucleotides comprising a nucleotide sequence described by the | | | |
| | general formula of a-b, where a is any integer between 1 to 592 of SEQ | | | |
| | ID NO: 197, b is an integer of 15 to 606, where both a and b correspond | | | |
| | to the positions of nucleotide residues shown in SEQ ID NO: 197, and | | | |
| | here b is greater than or equal to a + 14. | | | |
| 833094 | Preferably excluded from the present invention are one or more | | | |
| | polynucleotides comprising a nucleotide sequence described by the | | | |
| | general formula of a-b, where a is any integer between 1 to 379 of SEQ | | | |
| | ID NO:198, b is an integer of 15 to 393, where both a and b correspond | | | |
| | to the positions of nucleotide residues shown in SEQ ID NO: 198, and | | | |
| | where b is greater than or equal to a + 14. | | | |
| 833395 | Preferably excluded from the present invention are one or more | | | |
| | polynucleotides comprising a nucleotide sequence described by the | | | |
| | general formula of a-b, where a is any integer between 1 to 1047 of | | | |
| | SEQ ID NO:199, b is an integer of 15 to 1061, where both a and b | | | |
| | correspond to the positions of nucleotide residues shown in SEQ ID | | | |
| | NO:199, and where b is greater than or equal to a + 14. | | | |
| 834326 | Preferably excluded from the present invention are one or more | | | |
| | polynucleotides comprising a nucleotide sequence described by the | | | |
| | general formula of a-b, where a is any integer between 1 to 1345 of | | | |
| | SEQ ID NO:200, b is an integer of 15 to 1359, where both a and b | | | |
| | correspond to the positions of nucleotide residues shown in SEQ ID | | | |
| | NO:200, and where b is greater than or equal to a + 14. | | | |
| 834583 | Preferably excluded from the present invention are one or more | | | |
| | polynucleotides comprising a nucleotide sequence described by the | | | |
| | general formula of a-b, where a is any integer between 1 to 712 of SEQ | | | |
| | ID NO:201, b is an integer of 15 to 726, where both a and b correspond | | | |
| | to the positions of nucleotide residues shown in SEQ ID NO:201, and | | | |
| | where b is greater than or equal to a + 14. | | | |
| 834944 | Preferably excluded from the present invention are one or more | | | |
| | polynucleotides comprising a nucleotide sequence described by the | | | |
| | general formula of a-b, where a is any integer between 1 to 2700 of | | | |
| | SEQ ID NO:202, b is an integer of 15 to 2714, where both a and b | | | |
| | correspond to the positions of nucleotide residues shown in SEQ ID | | | |
| | NO:202, and where b is greater than or equal to a + 14. | | | |
| 835012 | Preferably excluded from the present invention are one or more | | | |
| | polynucleotides comprising a nucleotide sequence described by the | | | |
| | general formula of a-b, where a is any integer between 1 to 408 of SEQ | | | |
| | ID NO:203, b is an integer of 15 to 422, where both a and b correspond | | | |
| | to the positions of nucleotide residues shown in SEQ ID NO:203, and | | | |
| | where b is greater than or equal to a + 14. | | | |
| 835104 | Preferably excluded from the present invention are one or more | | | |
| | polynucleotides comprising a nucleotide sequence described by the | | | |
| | general formula of a-b, where a is any integer between 1 to 2325 of | | | |
| | SEQ ID NO:204, b is an integer of 15 to 2339, where both a and b | | | |
| | correspond to the positions of nucleotide residues shown in SEQ ID | | | |
| | NO:204, and where b is greater than or equal to a + 14. | | | |
| 835332 | Preferably excluded from the present invention are one or more | | | |
| | polynucleotides comprising a nucleotide sequence described by the | | | |
| | general formula of a-b, where a is any integer between 1 to 1641 of | | | |
| | SEQ ID NO:205, b is an integer of 15 to 1655, where both a and b | | | |
| | correspond to the positions of nucleotide residues shown in SEQ ID | | | |
| | NO:205, and where b is greater than or equal to a + 14. | | | |
| 835487 | Preferably excluded from the present invention are one or more | | | |
| | polynucleotides comprising a nucleotide sequence described by the | | | |
| | general formula of a-b, where a is any integer between 1 to 5131 of | | | |
| | SEQ ID NO:206, b is an integer of 15 to 5145, where both a and b | | | |
| | correspond to the positions of nucleotide residues shown in SEQ ID | | | |
| | NO:206, and where b is greater than or equal to a + 14. | | | |
| 836182 | Preferably excluded from the present invention are one or more | | | |
| | polynucleotides comprising a nucleotide sequence described by the | | | |
| | general formula of a-b, where a is any integer between 1 to 473 of SEQ | | | |
| | ID NO:207, b is an integer of 15 to 487, where both a and b correspond | | | |
| | to the positions of nucleotide residues shown in SEQ ID NO:207, and | | | |
| | here b is greater than or equal to a + 14. | | | |
| 836522 | Preferably excluded from the present invention are one or more | | | |
| | polynucleotides comprising a nucleotide sequence described by the | | | |
| | general formula of a-b, where a is any integer between 1 to 2282 of | | | |
| | SEQ ID NO:208, b is an integer of 15 to 2296, where both a and b | | | |
| | correspond to the positions of nucleotide residues shown in SEQ ID | | | |
| | NO:208, and where b is greater than or equal to a + 14. | | | |
| 836655 | Preferably excluded from the present invention are one or more | | | |
| | polynucleotides comprising a nucleotide sequence described by the | | | |
| | general formula of a-b, where a is any integer between 1 to 611 of SEQ | | | |
| | ID NNO:209, b is an integer of 15 to 625, where both a and b correspond | | | |
| | to the positions of nucleotide residues shown in SEQ ID NNO:209, and | | | |
| | where b is greater than or equal to a + 14. | | | |
| 836787 | Preferably excluded from the present invention are one or more | W56241, W56321, AA009901, AA521313, AA732599, | | |
| | polynucleotides comprising a nucleotide sequence described by the | AA730271, A766911, AA767313, W27009 | | |
| | general formula of a-b, where a is any integer between 1 to 1537 of | | | |
| | SEQ ID NO:210, b is an integer of 15 to 1551, where both a and b | | | |
| | correspond to the positions of nucleotide residues shown in SEQ ID | | | |
| | NO:210, and where b is greater than or equal to a + 14. | | | |
| 836789 | Preferably excluded from the present invention are one or more | T68817, R22374, R27362, H38950, R89148, R91088, | | |
| | polynucleotides comprising a nucleotide sequence described by the | H68416, H93594, N33889, N47045, N56761, W19886, | | |
| | general formula of a-b, where a is any integer between 1 to 997 of SEQ | W44630, W61370, W86385, AA036993, AA065062, | | |
| | ID NO:211, b is an integer of 15 to 1011, where both a and b | AA101017, AA121107, AA130485, | AA147474, | |
| | correspond to the positions of nucleotide residues shown in SEQ ID | AA160596, AA282977 | | |
| | NO:211, and where b is greater than or equal to a + 14. | | | |
| 838577 | Preferably excluded from the present invention are one or more | T53501, T40735, T63398, T63985, T64053, T64155, | | |
| | polynucleotides comprisinG a nucleotide sequence described by the | T64284, T93511, T94941, T94995, T96340, R00890, | | |
| | general formula of a-b, where a is any integer between 1 to 1625 of | R01553, R12738, R12739, R39790, R54423, R66373, | | |
| | SEQ ID NO:212, b is an integer of 15 to 1639, where both a and b | R66595, R67104, R67219, R79151, R79152, R82180, | | |
| | correspond to the positions of nucleotide residues shown in SEQ ID | R82224, R82470, R82471, H01963, H02048, H02758, | | |
| | NO:212, and where b is greater than or equal to a + 14. | H02759, H05982, H19484, H19567, H19882, H19900, | | |
| | H44901, H44938, H44978, H46289, H46871, H49538, | | | |
| | | H49781, H53114, H53220, H54300, H56079, H56279, | | |
| | | H79695, H79696, N23140, N25755, N25850, N26983, | | |
| | | N29784, N32719, N36477, N40104, N42924, N44580, | | |
| | | N50724, N55052, N67751, N93444, N98425, N98537, | | |
| | | W02803, W21105, W23673, W30688, W30899, | | |
| | | W35106, W45448, W45449, W45661, W44441, W46823, | | |
| | | W46872, W47373, W47374, W52205, W58331, W58652, | | |
| | | W96332, AA007386, AA007676, AA011363, | | |
| | | AA016311, AA017511, AA018464, | | |
| | | AA019899, AA025040, AA025039, AA029796, AA029797, | | |
| | | AA031472, AA035395, AA035396, AA037272, AA040791, | | |
| | | AA041228, AA042893, AA043029, AA055565, AA056185, | | |
| | | AA056186, AA056621, AA056726, AA069193, AA079705, | | |
| | | AA082517, AA084044, AA084043, AA115273, AA115056, | | |
| | | AA132031, AA132153, AA149267, AA149284, AA149378, | | |
| | | AA158093, AA158103, AA158364, AA158904, AA158905, | | |
| | | AA165106, AA220957, AA235312, AA251169, AA421302, | | |
| | | AA421425, AA428706, AA429291, AA513790, AA531603, | | |
| | | AA551736, AA554236, AA605236, AA604674, AA604939, | | |
| | | AA612935, AA617731, AA627300, AA687527, AA732095, | | |
| | | AA740760, AA765135, AA765136, AA765296, AA765891, | | |
| | | AA888144, AA908665, AA928038, AA936934, AA961143, | | |
| | | AA987647, AA975856, W03595, C03206, C18055, | | |
| | | AA164690, AA218956, AA291352, AA292329, AA293276, | | |
| | | AA393988, AA398076, AA410772, D12417, AA442678, | | |
| | | AA442969, AA454814, AA454888, AA482370, AA486098, | | |
| | | AA486161, AA625879, AA678365, AA679281, AA703505, | | |
| | | AA722872, AA732793, AA989559, AI003448, AI014938, | | |
| | | AI022070, AI084792, AI092360 | | |
| 838717 | Preferably excluded from the present invention are one or more | | | |
| | polynucleotides comprising a nucleotide sequence described by the | | | |
| | general formula of a-b, where a is any integer between 1 to 2113 of | | | |
| | SEQ ID NO:213, b is an integer of 15 to 2127, where both a and b | | | |
| | correspond to the positions of nucleotide residues shown in SEQ ID | | | |
| | NO:213, and where b is greater than or equal to a + 14. | | | |
| 839008 | Preferably excluded from the present invention are one or more | | | |
| | polynucleotides comprising a nucleotide sequence described by the | | | |
| | general formula of a-b, where a is any integer between 1 to 1152 of | | | |
| | SEQ ID NO:214, b is an integer of 15 to 1166, where both a and b | | | |
| | correspond to the positions of nucleotide residues shown in SEQ ID | | | |
| | NO:214, and where b is greater than or equal to a + 14. | | | |
| 840063 | Preferably excluded from the present invention are one or more | | | |
| | polynucleotides comprising a nucleotide sequence described by the | | | |
| | general formula of a-b, where a is any integer between 1 to 3309 of | | | |
| | SEQ ID NO:215, b is an integer of 15 to 3323, where both a and b | | | |
| | correspond to the positions of nucleotide residues shown in SEQ ID | | | |
| | NO:215, and where b is greater than or equal to a + 14. | | | |
| 840533 | Preferably excluded from the present invention are one or more | | | |
| | polynucleotides comprising a nucleotide sequence described by the | | | |
| | general formula of a-b, where a is any integer between 1 to 1394 of | | | |
| | SEQ ID NO:216, b is an integer of 15 to 1408, where both a and b | | | |
| | correspond to the positions of nucleotide residues shown in SEQ ID | | | |
| | NO:216, and where b is greater than or equal to a + 14. | | | |
| 840669 | Preferably excluded from the present invention are one or more | T71029, T79145, T79226, T99989, R59589, R61735, | | |
| | polynucleotides comprising a nucleotide sequence described by the | R61734, R66190, R67070, H16201, H16200, H22960, | | |
| | general formula of a-b, where a is any integer between 1 to 2097 of | H84137, H85574, H98850, N23572, N26340, N56614, | | |
| | SEQ ID NO:217, b is an integer of 15 to 2111, where both a and b | W72249, W76334, W86530, W87654, W87653, | | |
| | correspond to the positions of nucleotide residues shown in SEQ ID | AA057869, AA122103, AA129545, AA136524, A137122, | | |
| | NO:217, and where b is greater than or equal to a + 14. | AA429808, AA525242, AA558970, H99223, AA584317, | | |
| | | A595168, AA825180, AA931521, AA938437, | | |
| | | A1017369, N29659, N68604, W86674, AA007246 | | |
| 841140 | Preferably excluded from the present invention are one or more | | | |
| | polynucleotides comprising a nucleotide sequence described by the | | | |
| | general formula of a-b, where a is any integer between 1 to 2479 of | | | |
| | SEQ ID NO:218, b is an integer of 15 to 2493, where both a and b | | | |
| | correspond to the positions of nucleotide residues shown in SEQ ID | | | |
| | NO:218, and where b is greater than or equal to a + 14. | | | |
| 841386 | Preferably excluded from the present invention are one or more | A429393, AA429394, AA493187, AA807096, AA836046 | | |
| | polynucleotides comprising a nucleotide sequence described by the | | | |
| | general formula of a-b, where a is any integer between 1 to 1245 of | | | |
| | SEQ ID NO:219, b is an integer of 15 to 1259, where both a and b | | | |
| | correspond to the positions of nucleotide residues shown in SEQ ID | | | |
| | NO:219, and where b is greater than or equal to a + 14. | | | |
| 841480 | Preferably excluded from the present invention are one or more | | | |
| | polynucleotides comprising a nucleotide sequence described by the | | | |
| | general formula of a-b, where a is any integer between 1 to 1835 of | | | |
| | SEQ ID NO:220, b is an integer of 15 to 1849, where both a and b | | | |
| | correspond to the positions of nucleotide residues shown in SEQ ID | | | |
| | NO:220, and where b is greater than or equal to a + 14. | | | |
| 841509 | Preferably excluded from the present invention are one or more | | | |
| | polynucleotides comprising a nucleotide sequence described by the | | | |
| | general formula of a-b, where a is any integer between 1 to 1253 of | | | |
| | SEQ ID NO:221, b is an integer of 15 to 1267, where both a and b | | | |
| | correspond to the positions of nucleotide residues shown in SEQ ID | | | |
| | NO:221, and where b is greater than or equal to a + 14. | | | |
| 841616 | Preferably excluded from the present invention are one or more | | | |
| | polynucleotides comprising a nucleotide sequence described by the | | | |
| | general formula of a-b, where a is any integer between 1 to 740 of SEQ | | | |
| | ID NO:222, b is an integer of 15 to 754, where both a and b correspond | | | |
| | to the positions of nucleotide residues shown in SEQ ID NO:222, and | | | |
| | here b is greater than or equal to a + 14. | | | |
| 841900 | Preferably excluded from the present invention are one or more | R87848, AA806230, Z28656 | | |
| | polynucleotides comprising a nucleotide sequence described by the | | | |
| | general formula of a-b, where a is any integer between 1 to 1244 of | | | |
| | SEQ ID NO:223, b is an integer of 15 to 1258, where both a and b | | | |
| | correspond to the positions of nucleotide residues shown in SEQ ID | | | |
| | NO:223, and where b is greater than or equal to a + 14. | | | |
| 842054 | Preferably excluded from the present invention are one or more | | | |
| | polynucleotides comprising a nucleotide sequence described by the | | | |
| | general formula of a-b, where a is any integer between 1 to 570 of SEQ | | | |
| | ID NO:224, b is an integer of 15 to 584, where both a and b correspond | | | |
| | to the positions of nucleotide residues shown in SEQ ID NO:224, and | | | |
| | here b is greater than or equal to a + 14. | | | |
| 843061 | Preferably excluded from the present invention are one or more | | | |
| | polynucleotides comprising a nucleotide sequence described by the | | | |
| | general formula of a-b, where a is any integer between 1 to 3435 of | | | |
| | SEQ ID NO:225, b is an integer of 15 to 3449, where both a and b | | | |
| | correspond to the positions of nucleotide residues shown in SEQ ID | | | |
| | NO:225, and where b is greater than or equal to a + 14. | | | |
| 843544 | Preferably excluded from the present invention are one or more | | | |
| | polynucleotides comprising a nucleotide sequence described by the | | | |
| | general formula of a-b, where a is any integer between 1 to 1852 of | | | |
| | SEQ ID NO:226, b is an integer of 15 to 1866, where both a and b | | | |
| | correspond to the positions of nucleotide residues shown in SEQ ID | | | |
| | NO:226, and where b is greater than or equal to a + 14. | | | |
| 844092 | Preferably excluded from the present invention are one or more | | | |
| | polynucleotides comprising a nucleotide sequence described by the | | | |
| | general formula of a-b, where a is any integer between 1 to 1050 of | | | |
| | SEQ ID NO:227, b is an integer of 15 to 1064, where both a and b | | | |
| | correspond to the positions of nucleotide residues shown in SEQ ID | | | |
| | NO:227, and where b is greater than or equal to a + 14. | | | |
| 844270 | Preferably excluded from the present invention are one or more | | | |
| | polynucleotides comprising a nucleotide sequence described by the | | | |
| | general formula of a-b, where a is any integer between 1 to 359 of SEQ | | | |
| | ID NO:228, b is an integer of 15 to 373, where both a and b correspond | | | |
| | to the positions of nucleotide residues shown in SEQ ID NO:228, and | | | |
| | here b is greater than or equal to a + 14. | | | |
| 844604 | Preferably excluded from the present invention are one or more | | | |
| | polynucleotides comprising a nucleotide sequence described by the | | | |
| | general formula of a-b, where a is any integer between 1 to 2830 of | | | |
| | SEQ ID NO:229, b is an integer of 15 to 2844, where both a and b | | | |
| | correspond to the positions of nucleotide residues shown in SEQ ID | | | |
| | NO:229, and where b is greater than or equal to a + 14. | | | |
| 844685 | Preferably excluded from the present invention are one or more | | | |
| | polynucleotides comprising a nucleotide sequence described by the | | | |
| | general formula of a-b, where a is any integer between 1 to 1784 of | | | |
| | SEQ ID NO:230, b is an integer of 15 to 1798, where both a and b | | | |
| | correspond to the positions of nucleotide residues shown in SEQ ID | | | |
| | NO:230, and where b is greater than or equal to a + 14. | | | |
| 844855 | Preferably excluded from the present invention are one or more | | | |
| | polynucleotides comprising a nucleotide sequence described by the | | | |
| | general formula of a-b, where a is any integer between 1 to 1809 of | | | |
| | SEQ ID NO:231, b is an integer of 15 to 1823, where both a and b | | | |
| | correspond to the positions of nucleotide residues shown in SEQ ID | | | |
| | NO:231, and where b is greater than or equal to a + 14. | | | |
| 845101 | Preferably excluded from the present invention are one or more | | | |
| | polynucleotides comprising a nucleotide sequence described by the | | | |
| | general formula of a-b, where a is any integer between 1 to 956 of SEQ | | | |
| | ID NO:232, b is an integer of 15 to 970, where both a and b correspond | | | |
| | to the positions of nucleotide residues shown in SEQ ID NO:232, and | | | |
| | here b is greater than or equal to a + 14. | | | |
| 845141 | Preferably excluded from the present invention are one or more | | | |
| | polynucleotides comprising a nucleotide sequence described by the | | | |
| | general formula of a-b, where a is any integer between 1 to 953 of SEQ | | | |
| | ID NO:233, b is an integer of 15 to 967, where both a and b correspond | | | |
| | to the positions of nucleotide residues shown in SEQ ID NO:233, and | | | |
| | where b is greater than or equal to a + 14. | | | |
| 845220 | Preferably excluded from the present invention are one or more | R70310, H02204, H28992, H29096, W67797, W67855, | | |
| | polynucleotides comprising a nucleotide sequence described by the | W72320, A459289, AA459519, AA430385, AA746169 | | |
| | general formula of a-b, where a is any integer between 1 to 2149 of | | | |
| | SEQ ID NO:234, b is an integer of 15 to 2163, where both a and b | | | |
| | correspond to the positions of nucleotide residues shown in SEQ ID | | | |
| | NO:234, and where b is greater than or equal to a + 14. | | | |
| 845434 | Preferably excluded from the present invention are one or more | | | |
| | polynucleotides comprising a nucleotide sequence described by the | | | |
| | general formula of a-b, where a is any integer between 1 to 1307 of | | | |
| | SEQ ID NO:235, b is an integer of 15 to 1321, where both a and b | | | |
| | correspond to the positions of nucleotide residues shown in SEQ ID | | | |
| | NO:235, and where b is greater than or equal to a + 14. | | | |
| 845510 | Preferably excluded from the present invention are one or more | | | |
| | polynucleotides comprising a nucleotide sequence described by the | | | |
| | general formula of a-b, where a is any integer between 1 to 669 of SEQ | | | |
| | ID NO:236, b is an integer of 15 to 683, where both a and b correspond | | | |
| | to the positions of nucleotide residues shown in SEQ ID NO:236, and | | | |
| | where b is greater than or e ual to a + 14. | | | |
| 845600 | Preferably excluded from the present invention are one or more | | | |
| | polynucleotides comprising a nucleotide sequence described by the | | | |
| | general formula of a-b, where a is any integer between 1 to 2101 of | | | |
| | SEQ ID NO:237, b is an integer of 15 to 2115, where both a and b | | | |
| | correspond to the positions of nucleotide residues shown in SEQ ID | | | |
| | NO:237, and where b is greater than or equal to a + 14. | | | |
| 845882 | Preferably excluded from the present invention are one or more | | | |
| | polynucleotides comprising a nucleotide sequence described by the | | | |
| | general formula of a-b, where a is any integer between 1 to 1628 of | | | |
| | SEQ ID NO:238, b is an integer of 15 to 1642, where both a and b | | | |
| | correspond to the positions of nucleotide residues shown in SEQ ID | | | |
| | NO:238, and where b is greater than or equal to a + 14. | | | |
| 846007 | Preferably excluded from the present invention are one or more | H81424 | | |
| | polynucleotides comprising a nucleotide sequence described by the | | | |
| | general formula of a-b, where a is any integer between 1 to 454 of SEQ | | | |
| | ID NO:239, b is an integer of 15 to 468, where both a and b correspond | | | |
| | to the positions of nucleotide residues shown in SEQ ID NO:239, and | | | |
| | where b is greater than or equal to a + 14. | | | |
| 846280 | Preferably excluded from the present invention are one or more | | | |
| | polynucleotides comprising a nucleotide sequence described by the | | | |
| | general formula of a-b, where a is any integer between 1 to 1315 of | | | |
| | SEQ ID NO:240, b is an integer of 15 to 1329, where both a and b | | | |
| | correspond to the positions of nucleotide residues shown in SEQ ID | | | |
| | NO:240, and where b is greater than or equal to a + 14. | | | |
| 846286 | Preferably excluded from the present invention are one or more | | | |
| | polynucleotides comprising a nucleotide sequence described by the | | | |
| | general formula of a-b, where a is any integer between 1 to 1638 of | | | |
| | SEQ ID NO:241, b is an integer of 15 to 1652, where both a and b | | | |
| | correspond to the positions of nucleotide residues shown in SEQ ID | | | |
| | NO:241, and where b is greater than or equal to a + 14. | | | |
| 846388 | Preferably excluded from the present invention are one or more | | | |
| | polynucleotides comprising a nucleotide sequence described by the | | | |
| | general formula of a-b, where a is any integer between 1 to 1932 of | | | |
| | SEQ ID NO:242, b is an integer of 15 to 1946, where both a and b | | | |
| | correspond to the positions of nucleotide residues shown in SEQ ID | | | |
| | NO:242, and where b is greater than or equal to a + 14. | | | |

[0057] Polynucleotide and Polypeptide Variants

[0058] The present invention is directed to variants of the polynucleotide sequence disclosed in SEQ ID NO:X or the complementary strand thereto, and/or the cDNA sequence contained in a cDNA clone contained in the deposit.

[0059] The present invention also encompasses variants of a colorectal and/or colorectal cancer polypeptide sequence disclosed in SEQ ID NO:Y, a polypeptide sequence encoded by the polynucleotide sequence in SEQ ID NO:X, and/or a polypeptide sequence encoded by the cDNA in the related cDNA clone contained in the deposit.

[0060] “Variant” refers to a polynucleotide or polypeptide differing from the polynucleotide or polypeptide of the present invention, but retaining essential properties thereof. Generally, variants are overall closely similar, and, in many regions, identical to the polynucleotide or polypeptide of the present invention.

[0061] The present invention is also directed to nucleic acid molecules which comprise, or alternatively consist of, a nucleotide sequence which is at least 80%, 85%, 90%, 95%, 96%, 97%, 98%, 99% or 100%, identical to, for example, the nucleotide coding sequence in SEQ ID NO:X or the complementary strand thereto, the nucleotide coding sequence of the related cDNA contained in a deposited library or the complementary strand thereto, a nucleotide sequence encoding the polypeptide of SEQ ID NO:Y, a nucleotide sequence encoding a polypeptide sequence encoded by the nucleotide sequence in SEQ ID NO:X, a nucleotide sequence encoding the polypeptide encoded by the cDNA in the related cDNA contained in a deposited library, and/or polynucleotide fragments of any of these nucleic acid molecules (e.g., those fragments described herein). Polypeptides encoded by these nucleic acid molecules are also encompassed by the invention. In another embodiment, the invention encompasses nucleic acid molecules which comprise or alternatively consist of, a polynucleotide which hybridizes under stringent hybridization conditions, or alternatively, under low stringency conditions, to the nucleotide coding sequence in SEQ ID NO:X, the nucleotide coding sequence of the related cDNA clone contained in a deposited library, a nucleotide sequence encoding the polypeptide of SEQ ID NO:Y, a nucleotide sequence encoding a polypeptide sequence encoded by the nucleotide sequence in SEQ ID NO:X, a nucleotide sequence encoding the polypeptide encoded by the cDNA in the related cDNA clone contained in a deposited library, and/or polynucleotide fragments of any of these nucleic acid molecules (e.g., those fragments described herein). Polynucleotides which hybridize to the complement of these nucleic acid molecules under stringent hybridization conditions or alternatively, under lower stringency conditions, are also encompassed by the invention, as are polypeptides encoded by these polynucleotides.

[0062] The present invention is also directed to polypeptides which comprise, or alternatively consist of, an amino acid sequence which is at least 80%, 85%, 90%, 95%, 96%, 97%, 98%, 99% or 100% identical to, for example, the polypeptide sequence shown in SEQ ID NO:Y, a polypeptide sequence encoded by the nucleotide sequence in SEQ ID NO:X, a polypeptide sequence encoded by the cDNA in the related cDNA clone contained in a deposited library, and/or polypeptide fragments of any of these polypeptides (e.g., those fragments described herein). Polynucleotides which hybridize to the complement of the nucleic acid molecules encoding these polypeptides under stringent hybridization conditions, or alternatively, under lower stringency conditions, are also encompassed by the invention, as are polypeptides encoded by these polynucleotides.

[0063] By a nucleic acid having a nucleotide sequence at least, for example, 95% “identical” to a reference nucleotide sequence of the present invention, it is intended that the nucleotide sequence of the nucleic acid is identical to the reference sequence except that the nucleotide sequence may include up to five point mutations per each 100 nucleotides of the reference nucleotide sequence encoding the polypeptide. In other words, to obtain a nucleic acid having a nucleotide sequence at least 95% identical to a reference nucleotide sequence, up to 5% of the nucleotides in the reference sequence may be deleted or substituted with another nucleotide, or a number of nucleotides up to 5% of the total nucleotides in the reference sequence may be inserted into the reference sequence. The query sequence may be, for example, an entire sequence referred to in Table 1, an ORF (open reading frame), or any fragment specified as described herein.

[0064] As a practical matter, whether any particular nucleic acid molecule or polypeptide is at least 80%, 85%, 90%, 95%, 96%, 97%, 98% or 99% identical to a nucleotide sequence of the present invention can be determined conventionally using known computer programs. A preferred method for determining the best overall match between a query sequence (a sequence of the present invention) and a subject sequence, also referred to as a global sequence alignment, can be determined using the FASTDB computer program based on the algorithm of Brutlag et al. (Comp. App. Biosci. 6:237-245 (1990)). In a sequence alignment the query and subject sequences are both DNA sequences. An RNA sequence can be compared by converting U's to T's. The result of said global sequence alignment is in percent identity. Preferred parameters used in a FASTDB alignment of DNA sequences to calculate percent identiy are: Matrix=Unitary, k-tuple=4, Mismatch Penalty=1, Joining Penalty=30, Randomization Group Length=0, Cutoff Score=1, Gap Penalty=5, Gap Size Penalty 0.05, Window Size=500 or the lenght of the subject nucleotide sequence, whichever is shorter.

[0065] If the subject sequence is shorter than the query sequence because of 5′ or 3′ deletions, not because of internal deletions, a manual correction must be made to the results. This is because the FASTDB program does not account for 5′ and 3′ truncations of the subject sequence when calculating percent identity. For subject sequences truncated at the 5′ or 3′ ends, relative to the query sequence, the percent identity is corrected by calculating the number of bases of the query sequence that are 5′ and 3′ of the subject sequence, which are not matched/aligned, as a percent of the total bases of the query sequence. Whether a nucleotide is matched/aligned is determined by results of the FASTDB sequence alignment. This percentage is then subtracted from the percent identity, calculated by the above FASTDB program using the specified parameters, to arrive at a final percent identity score. This corrected score is what is used for the purposes of the present invention. Only bases outside the 5′ and 3′ bases of the subject sequence, as displayed by the FASTDB alignment, which are not matched/aligned with the query sequence, are calculated for the purposes of manually adjusting the percent identity score.

[0066] For example, a 90 base subject sequence is aligned to a 100 base query sequence to determine percent identity. The deletions occur at the 5′ end of the subject sequence and therefore, the FASTDB alignment does not show a matched/alignment of the first 10 bases at 5′ end. The 10 unpaired bases represent 10% of the sequence (number of bases at the 5′ and 3′ ends not matched/total number of bases in the query sequence) so 10% is subtracted from the percent identity score calculated by the FASTDB program. If the remaining 90 bases were perfectly matched the final percent identity would be 90%. In another example, a 90 base subject sequence is compared with a 100 base query sequence. This time the deletions are internal deletions so that there are no bases on the 5′ or 3′ of the subject sequence which are not matched/aligned with the query. In this case the percent identity calculated by FASTDB is not manually corrected. Once again, only bases 5′ and 3′ of the subject sequence which are not matched/aligned with the query sequence are manually corrected for. No other manual corrections are to made for the purposes of the present invention.

[0067] By a polypeptide having an amino acid sequence at least, for example, 95% “identical” to a query amino acid sequence of the present invention, it is intended that the amino acid sequence of the subject polypeptide is identical to the query sequence except that the subject polypeptide sequence may include up to five amino acid alterations per each 100 amino acids of the query amino acid sequence. In other words, to obtain a polypeptide having an amino acid sequence at least 95% identical to a query amino acid sequence, up to 5% of the amino acid residues in the subject sequence may be inserted, deleted, (indels) or substituted with another amino acid. These alterations of the reference sequence may occur at the amino or carboxy terminal positions of the reference amino acid sequence or anywhere between those terminal positions, interspersed either individually among residues in the reference sequence or in one or more contiguous groups within the reference sequence.

[0068] As a practical matter, whether any particular polypeptide is at least 80%, 85%, 90%, 95%, 96%, 97%, 98% or 99% identical to, for instance, the amino acid sequence in SEQ ID NO:Y or a fragment thereof, the amino acid sequence encoded by the nucleotide sequence in SEQ ID NO:X or a fragment thereof, or the amino acid sequence encoded by the cDNA in the related cDNA clone contained in a deposited library, or a fragment thereof, can be determined conventionally using known computer programs. A preferred method for determing the best overall match between a query sequence (a sequence of the present invention) and a subject sequence, also referred to as a global sequence alignment, can be determined using the FASTDB computer program based on the algorithm of Brutlag et al. (Comp. App. Biosci.6:237- 245(1990)). In a sequence alignment the query and subject sequences are either both nucleotide sequences or both amino acid sequences. The result of said global sequence alignment is in percent identity. Preferred parameters used in a FASTDB amino acid alignment are: Matrix=PAM 0, k-tuple=2, Mismatch Penalty=1, Joining Penalty=20, Randomization Group Length=0, Cutoff Score=l, Window Size=sequence length, Gap Penalty=5, Gap Size Penalty-0.05, Window Size=500 or the length of the subject amino acid sequence, whichever is shorter.

[0069] If the subject sequence is shorter than the query sequence due to N- or C-terminal deletions, not because of internal deletions, a manual correction must be made to the results. This is because the FASTDB program does not account for N- and C-terminal truncations of the subject sequence when calculating global percent identity. For subject sequences truncated at the N- and C-termini, relative to the query sequence, the percent identity is corrected by calculating the number of residues of the query sequence that are N- and C-terminal of the subject sequence, which are not matched/aligned with a corresponding subject residue, as a percent of the total bases of the query sequence. Whether a residue is matched/aligned is determined by results of the FASTDB sequence alignment. This percentage is then subtracted from the percent identity, calculated by the above FASTDB program using the specified parameters, to arrive at a final percent identity score. This final percent identity score is what is used for the purposes of the present invention. Only residues to the N- and C-termini of the subject sequence, which are not matched/aligned with the query sequence, are considered for the purposes of manually adjusting the percent identity score. That is, only query residue positions outside the farthest N- and C- terminal residues of the subject sequence.

[0070] For example, a 90 amino acid residue subject sequence is aligned with a 100 residue query sequence to determine percent identity. The deletion occurs at the N-terminus of the subject sequence and therefore, the FASTDB alignment does not show a matching/alignment of the first 10 residues at the N-terminus. The 10 unpaired residues represent 10% of the sequence (number of residues at the N- and C- termini not matched/total number of residues in the query sequence) so 10% is subtracted from the percent identity score calculated by the FASTDB program. If the remaining 90 residues were perfectly matched the final percent identity would be 90%. In another example, a 90 residue subject sequence is compared with a 100 residue query sequence. This time the deletions are internal deletions so there are no residues at the N- or C-termini of the subject sequence which are not matched/aligned with the query. In this case the percent identity calculated by FASTDB is not manually corrected. Once again, only residue positions outside the N- and C-terminal ends of the subject sequence, as displayed in the FASTDB alignment, which are not matched/aligned with the query sequence are manually corrected for. No other manual corrections are to made for the purposes of the present invention.

[0071] The variants may contain alterations in the coding regions, non-coding regions, or both. Especially preferred are polynucleotide variants containing alterations which produce silent substitutions, additions, or deletions, but do not alter the properties or activities of the encoded polypeptide. Nucleotide variants produced by silent substitutions due to the degeneracy of the genetic code are preferred. Moreover, variants in which less than 50, less than 40, less than 30, less than 20, less than 10, or 5-50, 5-25, 5-10, 1-5, or 1-2 amino acids are substituted, deleted, or added in any combination are also preferred. Polynucleotide variants can be produced for a variety of reasons, e.g., to optimize codon expression for a particular host (change codons in the human mRNA to those preferred by a bacterial host such as E. coli).

[0072] Naturally occurring variants are called “allelic variants,” and refer to one of several alternate forms of a gene occupying a given locus on a chromosome of an organism. (Genes II, Lewin, B., ed., John Wiley & Sons, New York (1985).) These allelic variants can vary at either the polynucleotide and/or polypeptide level and are included in the present invention. Alternatively, non-naturally occurring variants may be produced by mutagenesis techniques or by direct synthesis.

[0073] Using known methods of protein engineering and recombinant DNA technology, variants may be generated to improve or alter the characteristics of the polypeptides of the present invention. For instance, as discussed herein, one or more amino acids can be deleted from the N-terminus or C-terminus of the polypeptide of the present invention without substantial loss of biological function. The authors of Ron et al., J. Biol. Chem. 268: 2984-2988 (1993), reported variant KGF proteins having heparin binding activity even after deleting 3, 8, or 27 amino-terminal amino acid residues. Similarly, Interferon gamma exhibited up to ten times higher activity after deleting 8-10 amino acid residues from the carboxy terminus of this protein. (Dobeli et al., J. Biotechnology 7:199-216 (1988).)

[0074] Moreover, ample evidence demonstrates that variants often retain a biological activity similar to that of the naturally occurring protein. For example, Gayle and coworkers (J. Biol. Chem 268:22105-22111 (1993)) conducted extensive mutational analysis of human cytokine IL-1a. They used random mutagenesis to generate over 3,500 individual IL-la mutants that averaged 2.5 amino acid changes per variant over the entire length of the molecule. Multiple mutations were examined at every possible amino acid position. The investigators found that “[m]ost of the molecule could be altered with little effect on either [binding or biological activity]”. (See, Abstract.) In fact, only 23 unique amino acid sequences, out of more than 3,500 nucleotide sequences examined, produced a protein that significantly differed in activity from wild-type.

[0075] Furthermore, as discussed herein, even if deleting one or more amino acids from the N-terminus or C-terminus of a polypeptide results in modification or loss of one or more biological functions, other biological activities may still be retained. For example, the ability of a deletion variant to induce and/or to bind antibodies which recognize the secreted form will likely be retained when less than the majority of the residues of the secreted form are removed from the N-terminus or C-terminus. Whether a particular polypeptide lacking N- or C-terminal residues of a protein retains such immunogenic activities can readily be determined by routine methods described herein and otherwise known in the art.

[0076] Thus, the invention further includes polypeptide variants which show a functional activity (e.g., biological activity) of the polypeptide of the invention of which they are a variant. Such variants include deletions, insertions, inversions, repeats, and substitutions selected according to general rules known in the art so as have little effect on activity.

[0077] The present application is directed to nucleic acid molecules at least 80%, 85%, 90%, 95%, 96%, 97%, 98%, 99% or 100% identical to the nucleic acid sequences disclosed herein or fragments thereof, (e.g., including but not limited to fragments encoding a polypeptide having the amino acid sequence of an N and/or C terminal deletion), irrespective of whether they encode a polypeptide having functional activity. This is because even where a particular nucleic acid molecule does not encode a polypeptide having functional activity, one of skill in the art would still know how to use the nucleic acid molecule, for instance, as a hybridization probe or a polymerase chain reaction (PCR) primer. Uses of the nucleic acid molecules of the present invention that do not encode a polypeptide having functional activity include, inter alia, (1) isolating a gene or allelic or splice variants thereof in a cDNA library; (2) in situ hybridization (e.g., “FISH”) to metaphase chromosomal spreads to provide precise chromosomal location of the gene, as described in Verma et al., Human Chromosomes: A Manual of Basic Techniques, Pergamon Press, New York (1988); and (3) Northern Blot analysis for detecting mRNA expression in specific tissues.

[0078] Preferred, however, are nucleic acid molecules having sequences at least 80%, 85%, 90%, 95%, 96%, 97%, 98%, 99% or 100% identical to the nucleic acid sequences disclosed herein, which do, in fact, encode a polypeptide having a functional activity of a polypeptide of the invention.

[0079] Of course, due to the degeneracy of the genetic code, one of ordinary skill in the art will immediately recognize that a large number of the nucleic acid molecules having a sequence at least 80%, 85%, 90%, 95%, 96%, 97%, 98%, 99%, or 100% identical to, for example, the nucleic acid sequence of the cDNA in the related cDNA clone contained in a deposited library, the nucleic acid sequence referred to in Table 1 (SEQ ID NO:X), or fragments thereof, will encode polypeptides “having functional activity.” In fact, since degenerate variants of any of these nucleotide sequences all encode the same polypeptide, in many instances, this will be clear to the skilled artisan even without performing the above described comparison assay. It will be further recognized in the art that, for such nucleic acid molecules that are not degenerate variants, a reasonable number will also encode a polypeptide having functional activity. This is because the skilled artisan is fully aware of amino acid substitutions that are either less likely or not likely to significantly effect protein function (e.g., replacing one aliphatic amino acid with a second aliphatic amino acid), as further described below.

[0080] For example, guidance concerning how to make phenotypically silent amino acid substitutions is provided in Bowie et al., “Deciphering the Message in Protein Sequences: Tolerance to Amino Acid Substitutions,” Science 247:1306-1310 (1990), wherein the authors indicate that there are two main strategies for studying the tolerance of an amino acid sequence to change.

[0081] The first strategy exploits the tolerance of amino acid substitutions by natural selection during the process of evolution. By comparing amino acid sequences in different species, conserved amino acids can be identified. These conserved amino acids are likely important for protein function. In contrast, the amino acid positions where substitutions have been tolerated by natural selection indicates that these positions are not critical for protein function. Thus, positions tolerating amino acid substitution could be modified while still maintaining biological activity of the protein.

[0082] The second strategy uses genetic engineering to introduce amino acid changes at specific positions of a cloned gene to identify regions critical for protein function. For example, site directed mutagenesis or alanine-scanning mutagenesis (introduction of single alanine mutations at every residue in the molecule) can be used. (Cunningham and Wells, Science 244:1081-1085 (1989).) The resulting mutant molecules can then be tested for biological activity.

[0083] As the authors state, these two strategies have revealed that proteins are surprisingly tolerant of amino acid substitutions. The authors further indicate which amino acid changes are likely to be permissive at certain amino acid positions in the protein. For example, most buried (within the tertiary structure of the protein) amino acid residues require nonpolar side chains, whereas few features of surface side chains are generally conserved. Moreover, tolerated conservative amino acid substitutions involve replacement of the aliphatic or hydrophobic amino acids Ala, Val, Leu and Ile; replacement of the hydroxyl residues Ser and Thr; replacement of the acidic residues Asp and Glu; replacement of the amide residues Asn and Gln, replacement of the basic residues Lys, Arg, and His; replacement of the aromatic residues Phe, Tyr, and Trp, and replacement of the small-sized amino acids Ala, Ser, Thr, Met, and Gly. Besides conservative amino acid substitution, variants of the present invention include (i) substitutions with one or more of the non-conserved amino acid residues, where the substituted amino acid residues may or may not be one encoded by the genetic code, or (ii) substitution with one or more of amino acid residues having a substituent group, or (iii) fusion of the mature polypeptide with another compound, such as a compound to increase the stability and/or solubility of the polypeptide (for example, polyethylene glycol), or (iv) fusion of the polypeptide with additional amino acids, such as, for example, an IgG Fc fusion region peptide, or leader or secretory sequence, or a sequence facilitating purification. Such variant polypeptides are deemed to be within the scope of those skilled in the art from the teachings herein.

[0084] For example, polypeptide variants containing amino acid substitutions of charged amino acids with other charged or neutral amino acids may produce proteins with improved characteristics, such as less aggregation. Aggregation of pharmaceutical formulations both reduces activity and increases clearance due to the aggregate's immunogenic activity. (Pinckard et al., Clin. Exp. Immunol. 2:331-340 (1967); Robbins et al., Diabetes 36: 838-845 (1987); Cleland et al., Crit. Rev. Therapeutic Drug Carrier Systems 10:307-377 (1993).)

[0085] A further embodiment of the invention relates to a polypeptide which comprises the amino acid sequence of a polypeptide having an amino acid sequence which contains at least one amino acid substitution, but not more than 50 amino acid substitutions, even more preferably, not more than 40 amino acid substitutions, still more preferably, not more than 30 amino acid substitutions, and still even more preferably, not more than 20 amino acid substitutions. Of course it is highly preferable for a polypeptide to have an amino acid sequence which comprises the amino acid sequence of a polypeptide of SEQ ID NO:Y, an amino acid sequence encoded by SEQ ID NO:X, and/or the amino acid sequence encoded by the cDNA in the related cDNA clone contained in a deposited library which contains, in order of ever-increasing preference, at least one, but not more than 10, 9, 8, 7, 6, 5, 4, 3, 2 or 1 amino acid substitutions. In specific embodiments, the number of additions, substitutions, and/or deletions in the amino acid sequence of SEQ ID NO:Y or fragments thereof (e.g., the mature form and/or other fragments described herein), an amino acid sequence encoded by SEQ ID NO:X or fragments thereof, and/or the amino acid sequence encoded by the cDNA in the related cDNA clone contained in a deposited library or fragments thereof, is 1-5, 5-10, 5-25, 5-50, 10-50 or 50-150, conservative amino acid substitutions are preferable.

[0086] Polynucleotide and Polypeptide Fragments

[0087] The present invention is also directed to polynucleotide fragments of the colorectal and/or colorectal cancer polynucleotides (nucleic acids) of the invention. In the present invention, a “polynucleotide fragment” refers, for example, to a polynucleotide having a nucleic acid sequence which: is a portion of the cDNA contained in a depostied cDNA clone; or is a portion of a polynucleotide sequence encoding the polypeptide encoded by the cDNA contained in a deposited cDNA clone; or is a portion of the polynucleotide sequence in SEQ ID NO:X or the complementary strand thereto; or is a polynucleotide sequence encoding a portion of the polypeptide of SEQ ID NO:Y; or is a polynucleotide sequence encoding a portion of a polypeptide encoded by SEQ ID NO:X or the complementary strand thereto. The nucleotide fragments of the invention are preferably at least about 15 nt, and more preferably at least about 20 nt, still more preferably at least about 30 nt, and even more preferably, at least about 40 nt, at least about 50 nt, at least about 75 nt, at least about 100 nt, at least about 125 nt or at least about 150 nt in length. A fragment “at least 20 nt in length,” for example, is intended to include 20 or more contiguous bases from, for example, the sequence contained in the cDNA in a related cDNA clone contained in a deposited library, the nucleotide sequence shown in SEQ ID NO:X or the complementary stand thereto. In this context “about” includes the particularly recited value or a value larger or smaller by several (5, 4, 3, 2, or 1) nucleotides. These nucleotide fragments have uses that include, but are not limited to, as diagnostic probes and primers as discussed herein. Of course, larger fragments (e.g., at least 150, 175, 200, 250, 500, 600, 1000, or 2000 nucleotides in length) are also encompassed by the invention.

[0088] Moreover, representative examples of polynucleotide fragments of the invention, include, for example, fragments comprising, or alternatively consisting of, a sequence from about nucleotide number 1-50, 51-100, 101-150, 151-200, 201-250, 251-300, 301-350, 351-400, 401-450, 451-500, 501-550, 551-600, 651-700, 701- 750, 751-800, 800-850, 851-900, 901-950, 951-1000, 1001-1050, 1051-1100, 1101-1150, 1151-1200, 1201-1250, 1251-1300, 1301-1350, 1351-1400, 1401-1450, 1451-1500, 1501-1550, 1551-1600, 1601-1650, 1651-1700, 1701-1750, 1751-1800, 1801-1850, 1851-1900, 1901-1950, 1951-2000, 2001-2050, 2051-2100, 2101-2150, 2151-2200, 2201-2250, 2251-2300, 2301-2350, 2351-2400, 2401-2450, 2451-2500, 2501-2550, 2551-2600, 2601-2650, 2651-2700, 2701-2750, 2751-2800, 2801-2850, 2851-2900, 2901-2950, 2951-3000, 3001-3050, 3051-3100, 3101-3150, 3151-3200, 3201-3250, 3251-3300, 3301-3350, 3351-3400, 3401-3450, 3451-3500, 3501-3550, 3551-3600, 3601-3650, 3651-3700, 3701-3750, 3751-3800, 3801-3850, 3851-3900, 3901-3950, 3951-4000, 4001-4050, 4051-4100, and 4101 to the end of SEQ ID NO:X, or the complementary strand thereto. In this context “about” includes the particularly recited range or a range larger or smaller by several (5, 4, 3, 2, or 1) nucleotides, at either terminus or at both termini. Preferably, these fragments encode a polypeptide which has a functional activity (e.g., biological activity) of the polypeptide encoded by the polynucleotide of which the sequence is a portion. More preferably, these fragments can be used as probes or primers as discussed herein. Polynucleotides which hybridize to one or more of these nucleic acid molecules under stringent hybridization conditions or alternatively, under lower stringency conditions, are also encompassed by the invention, as are polypeptides encoded by these polynucleotides or fragments.

[0089] Moreover, representative examples of polynucleotide fragments of the invention, include, for example, fragments comprising, or alternatively consisting of, a sequence from about nucleotide number 1-50, 51-100, 101-150, 151-200, 201-250, 251-300, 301-350, 351-400, 401-450, 451-500, 501-550, 551-600, 651-700, 701- 750, 751-800, 800-850, 851-900, 901-950, 951-1000, 1001-1050, 1051-1100, 1101-1150, 1151-1200, 1201-1250, 1251-1300, 1301-1350, 1351-1400, 1401-1450, 1451-1500, 1501-1550, 1551-1600, 1601-1650, 1651-1700, 1701-1750, 1751-1800, 1801-1850, 1851-1900, 1901-1950, 1951-2000, 2001-2050, 2051-2100, 2101-2150, 2151-2200, 2201-2250, 2251-2300, 2301-2350, 2351-2400, 2401-2450, 2451-2500, 2501-2550, 2551-2600, 2601-2650, 2651-2700, 2701-2750, 2751-2800, 2801-2850, 2851-2900, 2901-2950, 2951-3000, 3001-3050, 3051-3100, 3101-3150, 3151-3200, 3201-3250, 3251-3300, 3301-3350, 3351-3400, 3401-3450, 3451-3500, 3501-3550, 3551-3600, 3601-3650, 3651-3700, 3701-3750, 3751-3800, 3801-3850, 3851-3900, 3901-3950, 3951-4000, 4001-4050, 4051-4100, and 4101 to the end of the cDNA nucleotide sequence contained in the deposited cDNA clone, or the complementary strand thereto. In this context “about” includes the particularly recited range, or a range larger or smaller by several (5, 4, 3, 2, or 1) nucleotides, at either terminus or at both termini. Preferably, these fragments encode a polypeptide which has a functional activity (e.g., biological activity) of the polypeptide encoded by the cDNA nucleotide sequence contained in the deposited cDNA clone. More preferably, these fragments can be used as probes or primers as discussed herein. Polynucleotides which hybridize to one or more of these fragments under stringent hybridization conditions or alternatively, under lower stringency conditions, are also encompassed by the invention, as are polypeptides encoded by these polynucleotides or fragments.

[0090] In the present invention, a “polypeptide fragment” refers to an amino acid sequence which is a portion of that contained in SEQ ID NO:Y, a portion of an amino acid sequence encoded by the polynucleotide sequence of SEQ ID NO:X, and/or encoded by the cDNA contained in the related cDNA clone contained in a deposited library. Protein (polypeptide) fragments may be “free-standing,” or comprised within a larger polypeptide of which the fragment forms a part or region, most preferably as a single continuous region. Representative examples of polypeptide fragments of the invention, include, for example, fragments comprising, or alternatively consisting of, an amino acid sequence from about amino acid number 1-20, 21-40, 41-60, 61-80, 81-100, 102-120, 121-140, 141-160, 161-180, 181-200, 201-220, 221-240, 241-260, 261-280, 281-300, 301-320, 321-340, 341-360, 361-380, 381-400, 401-420, 421-440, 441-460, 461-480, 481-500, 501-520, 521-540, 541-560, 561-580, 581-600, 601-620, 621-640, 641-660, 661-680, 681-700, 701-720, 721-740, 741-760, 761-780, 781-800, 801-820, 821-840, 841-860, 861-880, 881-900, 901-920, 921-940, 941-960, 961-980, 981-1000, 1001-1020, 1021-1040, 1041-1060, 1061-1080, 1081-1100, 1101-1120, 1121-1140, 1141-1160, 1161-1180, 1181-1200, 1201-1220, 1221-1240, 1241-1260, 1261-1280, 1281-1300, 1301-1320, 1321-1340, 1341-1360, and 1361 to the end of SEQ ID NO:Y. Moreover, polypeptide fragments of the invention may be at least about 10, 15, 20, 25, 30, 35, 40, 45, 50, 55, 60, 65, 70, 75, 80, 85, 90, 100, 110, 120, 130, 140, or 150 amino acids in length. In this context “about” includes the particularly recited ranges or values, or ranges or values larger or smaller by several (5, 4, 3, 2, or 1) amino acids, at either terminus or at both termini. Polynucleotides encoding these polypeptide fragments are also encompassed by the invention.

[0091] Even if deletion of one or more amino acids from the N-terminus of a protein results in modification of loss of one or more biological functions of the protein, other functional activities (e.g., biological activities, ability to multimerize, ability to bind a ligand) may still be retained. For example, the ability of shortened muteins to induce and/or bind to antibodies which recognize the complete or mature forms of the polypeptides generally will be retained when less than the majority of the residues of the complete or mature polypeptide are removed from the N-terminus. Whether a particular polypeptide lacking N-terminal residues of a complete polypeptide retains such immunologic activities can readily be determined by routine methods described herein and otherwise known in the art. It is not unlikely that a mutein with a large number of deleted N-terminal amino acid residues may retain some biological or immunogenic activities. In fact, peptides composed of as few as six amino acid residues may often evoke an immune response.

[0092] Accordingly, polypeptide fragments of the invention include the secreted protein as well as the mature form. Further preferred polypeptide fragments include the secreted protein or the mature form having a continuous series of deleted residues from the amino or the carboxy terminus, or both. For example, any number of amino acids, ranging from 1-60, can be deleted from the amino terminus of either the secreted polypeptide or the mature form. Similarly, any number of amino acids, ranging from 1-30, can be deleted from the carboxy terminus of the secreted protein or mature form. Furthermore, any combination of the above amino and carboxy terminus deletions are preferred. Similarly, polynucleotides encoding these polypeptide fragments are also preferred.

[0093] The present invention further provides polypeptides having one or more residues deleted from the amino terminus of the amino acid sequence of a polypeptide disclosed herein (e.g., a polypeptide of SEQ ID NO:Y, a polypeptide encoded by the polynucleotide sequence contained in SEQ ID NO:X, and/or a polypeptide encoded by the cDNA contained in the related cDNA clone contained in a deposited library). In particular, N-terminal deletions may be described by the general formula m-q, where q is a whole integer representing the total number of amino acid residues in a polypeptide of the invention (e.g., the polypeptide disclosed in SEQ ID NO:Y), and m is defined as any integer ranging from 2 to q-6. Polynucleotides encoding these polypeptides are also encompassed by the invention.

[0094] Also as mentioned above, even if deletion of one or more amino acids from the C-terminus of a protein results in modification of loss of one or more biological functions of the protein, other functional activities (e.g., biological activities, ability to multimerize, ability to bind a ligand) may still be retained. For example the ability of the shortened mutein to induce and/or bind to antibodies which recognize the complete or mature forms of the polypeptide generally will be retained when less than the majority of the residues of the complete or mature polypeptide are removed from the C-terminus. Whether a particular polypeptide lacking C-terminal residues of a complete polypeptide retains such immunologic activities can readily be determined by routine methods described herein and otherwise known in the art. It is not unlikely that a mutein with a large number of deleted C-terminal amino acid residues may retain some biological or immunogenic activities. In fact, peptides composed of as few as six amino acid residues may often evoke an immune response.

[0095] Accordingly, the present invention further provides polypeptides having one or more residues from the carboxy terminus of the amino acid sequence of a polypeptide disclosed herein (e.g., a polypeptide of SEQ ID NO:Y, a polypeptide encoded by the polynucleotide sequence contained in SEQ ID NO:X, and/or a polypeptide encoded by the cDNA contained in the related cDNA referenced in Table 1). In particular, C-terminal deletions may be described by the general formula 1-n, where n is any whole integer ranging from 6 to q-1, and where n corresponds to the position of an amino acid residue in a polypeptide of the invention. Polynucleotides encoding these polypeptides are also encompassed by the invention.

[0096] In addition, any of the above described N- or C-terminal deletions can be combined to produce a N- and C-terminal deleted polypeptide. The invention also provides polypeptides having one or more amino acids deleted from both the amino and the carboxyl termini, which may be described generally as having residues m-n of a polypeptide encoded by SEQ ID NO:X (e.g., including, but not limited to, the preferred polypeptide disclosed as SEQ ID NO:Y), and/or the cDNA in the related cDNA clone contained in a deposited library, where n and m are integers as described above. Polynucleotides encoding these polypeptides are also encompassed by the invention.

[0097] Any polypeptide sequence contained in the polypeptide of SEQ ID NO:Y, encoded by the polynucleotide sequences set forth as SEQ ID NO:X, or encoded by the cDNA in the related cDNA clone contained in a deposited library may be analyzed to determine certain preferred regions of the polypeptide. For example, the amino acid sequence of a polypeptide encoded by a polynucleotide sequence of SEQ ID NO:X, or the cDNA in a deposited cDNA clone may be analyzed using the default parameters of the DNASTAR computer algorithm (DNASTAR, Inc., 1228 S. Park St., Madison, Wis. 53715 USA; http://www.dnastar.com/).

[0098] Polypeptide regions that may be routinely obtained using the DNASTAR computer algorithm include, but are not limited to, Garnier-Robson alpha-regions, beta-regions, turn-regions, and coil-regions, Chou-Fasman alpha-regions, beta-regions, and turn-regions, Kyte-Doolittle hydrophilic regions and hydrophobic regions, Eisenberg alpha- and beta-amphipathic regions, Karplus-Schulz flexible regions, Emini surface-forming regions and Jameson-Wolf regions of high antigenic index. Among highly preferred polynucleotides of the invention in this regard are those that encode polypeptides comprising regions that combine several structural features, such as several (e.g., 1, 2, 3 or 4) of the features set out above.

[0099] Additionally, Kyte-Doolittle hydrophilic regions and hydrophobic regions, Emini surface-forming regions, and Jameson-Wolf regions of high antigenic index (i.e., containing four or more contiguous amino acids having an antigenic index of greater than or equal to 1.5, as identified using the default parameters of the Jameson-Wolf program) can routinely be used to determine polypeptide regions that exhibit a high degree of potential for antigenicity. Regions of high antigenicity are determined from data by DNASTAR analysis by choosing values which represent regions of the polypeptide which are likely to be exposed on the surface of the polypeptide in an environment in which antigen recognition may occur in the process of initiation of an immune response.

[0100] Preferred polypeptide fragments of the invention are fragments comprising, or alternatively consisting of, an amino acid sequence that displays a functional activity of the polypeptide sequence of which the amino acid sequence is a fragment.

[0101] By a polypeptide demonstrating a “functional activity” is meant, a polypeptide capable of displaying one or more known functional activities associated with a full-length (complete) protein of the invention. Such functional activities include, but are not limited to, biological activity, antigenicity [ability to bind (or compete with a polypeptide for binding) to an anti-polypeptide antibody], immunogenicity (ability to generate antibody which binds to a specific polypeptide of the invention), ability to form multimers with polypeptides of the invention, and ability to bind to a receptor or ligand for a polypeptide.

[0102] Other preferred polypeptide fragments are biologically active fragments. Biologically active fragments are those exhibiting activity similar, but not necessarily identical, to an activity of the polypeptide of the present invention. The biological activity of the fragments may include an improved desired activity, or a decreased undesirable activity.

[0103] In preferred embodiments, polypeptides of the invention comprise, or alternatively consist of, one, two, three, four, five or more of the antigenic fragments of the polypeptide of SEQ ID NO:Y, or portions thereof. Polynucleotides encoding these polypeptides are also encompassed by the invention.

TABLE 4

| Sequence/ | |
|---|---|
| Contig ID | Predicted Epitopes |
| 500802 | Preferred epitopes include those comprising a sequence |
| | shown in SEQ ID NO. 774 as residues: Gln-1 to Ser-17, |
| | Ser-19 Ser-19 to Ile-25, Leu-29 to Arg-41, Ser-46 to |
| | Glu-57. |
| 553147 | Preferred epitopes include those comprising a sequence |
| | shown in SEQ ID NO. 776 as residues: Phe-1 to |
| | Ile-20. |
| 558860 | Preferred epitopes include those comprising a sequence |
| | shown in SEQ ID NO. 777 as residues: Ser-6 to |
| | Arg-11. |
| 561730 | Preferred epitopes include those comprising a sequence |
| | shown in SEQ ID NO. 778 as residues: Asn-1 to |
| | Arg-7, Leu-28 to Pro-45. |
| 585938 | Preferred epitopes include those comprising a sequence |
| | shown in SEQ ID NO. 779 as residues: Arg-10 to |
| | Ser-23, Gln-69 to His-74. |
| 587785 | Preferred epitopes include those comprising a sequence |
| | shown in SEQ ID NO. 780 as residues: Iie-1 to |
| | Ser-11, Leu-20 to Thr-30, Cys-74 to Cys-82, Leu-94 |
| | to Glu-110. |
| 588916 | Preferred epitopes include those comprising a sequence |
| | shown in SEQ ID NO. 781 as residues: Val-43 to |
| | Pro-55, Glu-92 to Ser-99. |
| 613825 | Preferred epitopes include those comprising a sequence |
| | shown in SEQ ID NO. 782 as residues: Asn-1 to |
| | Trp-11, Ser-15 to Gln-22, Ser-43 to Ala-51, Lys-58 to |
| | Gly-66. |
| 639090 | Preferred epitopes include those comprising a sequence |
| | shown in SEQ ID NO. 783 as residues: Ser-29 to |
| | Ser-35, Pro-43 to Gly-48, Gln-60 to Ser-65. |
| 659544 | Preferred epitopes include those comprising a sequence |
| | shown in SEQ ID NO. 785 as residues: Leu-10 to |
| | Glu-15, His-19 to Glu-26. |
| 659739 | Preferred epitopes include those comprising a sequence |
| | shown in SEQ ID NO. 786 as residues: Lys-70 to |
| | His-78, Lys-149 to Asn-154, Gly-209 to Leu-217, |
| | Lys-248 to Val-55, Ile-259 to Arg-264, Arg-280 to |
| | Ala-287. |
| 661057 | Preferred epitopes include those comprising a sequence |
| | shown in SEQ ID NO. 787 as residues: Cys-59 to |
| | Arg-64, Gly-110 to Asp-115, Pro-127 to Trp-132. |
| 661313 | Preferred epitopes include those comprising a sequence |
| | shown in SEQ ID NO. 788 as residues: Glu-1 to |
| | Phe-7, Lys-42 to Leu-48. |
| 666316 | Preferred epitopes include those comprising a sequence |
| | shown in SEQ ID NO. 789 as residues: Lys-27 to |
| | Asn-52. |
| 669229 | Preferred epitopes include those comprising a sequence |
| | shown in SEQ ID NO. 790 as residues: Asp-1 to |
| | Phe-12, Val-92 to Ser-103. |
| 670471 | Preferred epitopes include those comprising a sequence |
| | shown in SEQ ID NO. 791 as residues: Lys-75 to |
| | Asp-81, Glu-145 to Gln-156, Glu-163 to Arg-170, |
| | Lys-225 to Leu-231. |
| 676611 | Preferred epitopes include those comprising a sequence |
| | shown in SEQ ID NO. 792 as residues: Tyr-4 to |
| | Lys-12, Thr-23 to Asn-31, Val-52 to Thr-63, Arg-90 |
| | to Met-95. |
| 691240 | Preferred epitopes include those comprising a sequence |
| | shown in SEQ ID NO. 793 as residues: Pro-74 to |
| | Glu-79, Ser-116 to Lys-121. |
| 702977 | Preferred epitopes include those comprising a sequence |
| | shown in SEQ ID NO. 794 as residues: Pro-8 to |
| | Tyr-20. |
| 709517 | Preferred epitopes include those comprising a sequence |
| | shown in SEQ ID NO. 795 as residues: Leu-7 to |
| | Gly-12, Cys-20 to His-27. |
| 714730 | Preferred epitopes include those comprising a sequence |
| | shown in SEQ ID NO. 796 as residues: Pro-14 to |
| | Arg-23, Ala-171 to Ser-178. |
| 714834 | Preferred epitopes include those comprising a sequence |
| | shown in SEQ ID NO. 797 as residues: Ala-6 to |
| | Gly-12, Gln-15 to Arg-32. |
| 719584 | Preferred epitopes include those comprising a sequence |
| | shown in SEQ ID NO. 799 as residues: Pro-22 to |
| | Ile-31. |
| 724637 | Preferred epitopes include those comprising a sequence |
| | shown in SEQ ID NO. 800 as residues: Val-11 to |
| | Arg-34, Asn-54 to Cys-59. |
| 728392 | Preferred epitopes include those comprising a sequence |
| | shown in SEQ ID NO. 801 as residues: Arg-31 to |
| | Glu-45, Gly-76 to Pro-88, Asn-143 to Asp-148. |
| 738716 | Preferred epitopes include those comprising a sequence |
| | shown in SEQ ID NO. 802 as residues: Pro-40 to |
| | Pro-46. |
| 739056 | Preferred epitopes include those comprising a sequence |
| | shown in SEQ ID NO. 803 as residues: Ser-28 to |
| | Ala-33, Pro-44 to Phe-49, Arg-113 to Gly-118, |
| | Pro-131 to Arg-142, Asp-155 to Leu-166. |
| 739143 | Preferred epitopes include those comprising a sequence |
| | shown in SEQ ID NO. 804 as residues: Ala-1 to |
| | Gly-14, Glu-21 to Gly-27, Asp-54 to Lys-59, Lys-64 |
| | to Glu-71, Gln-2 to Leu-97, Asn-114 to His-120, |
| | Leu-135 to Asp-142, Glu-149 to Ser-154, Ser-256 to |
| | Thr-261, Asp-290 to Lys-301, Glu-315 to Gln-323, |
| | Lys-331 to Asn-342, Arg-346 to Met-361. |
| 742329 | Preferred epitopes include those comprising a sequence |
| | shown in SEQ ID NO. 805 as residues: Arg-7 to |
| | Ala-13, Gln-21 to Ser-27, Gln-68 to Gly-73, Pro-75 |
| | to Val-88. |
| 745481 | Preferred epitopes include those comprising a sequence |
| | shown in SEQ ID NO. 807 as residues: Asn-1 to |
| | Lys-14, Arg-32 to His-39, Asn-46 to Gly-51. |
| 753731 | Preferred epitopes include those comprising a sequence |
| | shown in SEQ ID NO. 809 as residues: Arg-22 to |
| | Ser-39, Val-42 to Thr-54, Gln-61 to His-69. |
| 754383 | Preferred epitopes include those comprising a sequence |
| | shown in SEQ ID NO. 810 as residues: Ala-2 to |
| | Gly-12. |
| 756749 | Preferred epitopes include those comprising a sequence |
| | shown in SEQ ID NO. 811 as residues: His-1 to |
| | Thr-11, Thr-13 to Ser-15, Gly-25 to Gly-30, Pro-63 |
| | to Pro-69, Glu-84 to Tyr-101, Asn-110 to Ala-140. |
| 757980 | Preferred epitopes include those comprising a sequence |
| | shown in SEQ ID NO. 812 as residues: Phe-9 to |
| | His-21. |
| 764818 | Preferred epitopes include those comprising a sequence |
| | shown in SEQ ID NO. 813 as residues: Pro-12 to |
| | Trp-17, Asn-22 to Ala-37, Arg-45 to Gly-54, Asp-72 |
| | to Thr-95, Pro-97 to Glu-116, Gly-137 to Lys-151, |
| | Glu-164 to Asp-171, Ser-175 to Gly-185, Glu-187 |
| | to Gly-213, Lys-270 to Glu-276, Leu-281 to Lys-286, |
| | Asp-314 to Gly-321, Glu-324 to Glu-331, Val-333 to |
| | Arg-340. |
| 765140 | Preferred epitopes include those comprising a sequence |
| | shown in SEQ ID NO. 814 as residues: Thr-15 to |
| | Asp-27. |
| 766893 | Preferred epitopes include those comprising a sequence |
| | shown in SEQ ID NO. 815 as residues: Arg-6 to |
| | Leu-11, Arg-21 to Tyr-27, Phe-37 to Lys-46, Gly-59 to |
| | Gly-64. |
| 771412 | Preferred epitopes include those comprising a sequence |
| | shown in SEQ ID NO. 817 as residues: Pro-1 to |
| | His-6, Pro-37 to Arg-47. |
| 772226 | Preferred epitopes include those comprising a sequence |
| | shown in SEQ ID NO. 818 as residues: Phe-16 to |
| | Arg-30, Glu-35 to Trp-58, Lys-60 to Gln-68, |
| | Pro-80 to Tyr-85. |
| 773057 | Preferred epitopes include those comprising a sequence |
| | shown in SEQ ID NO. 819 as residues: Gly-37 to |
| | Arg-43. |
| 773173 | Preferred epitopes include those comprising a sequence |
| | shown in SEQ ID NO. 820 as residues: Pro-19 to |
| | Asn-26. |
| 780154 | Preferred epitopes include those comprising a sequence |
| | shown in SEQ ID NO. 821 as residues: Arg-20 to |
| | Ile-31, Pro-34 to Ala-59, Glu-66 to Pro-125, |
| | Leu-132 to Lys-137, Lys-155 to Arg-259. |
| 780768 | Preferred epitopes include those comprising a sequence |
| | shown in SEQ ID NO. 822 as residues: Phe-12 to |
| | Lys-17. |
| 780779 | Preferred epitopes include those comprising a sequence |
| | shown in SEQ ID NO. 823 as residues: Ser-1 to |
| | Ser-11, Gln-64 to Gln-69, Arg-1 17 to Arg-127. |
| 782394 | Preferred epitopes include those comprising a sequence |
| | shown in SEQ ID NO. 824 as residues: Phe-18 to |
| | Gly-24. |
| 783160 | Preferred epitopes include those comprising a sequence |
| | shown in SEQ ID NO. 825 as residues: Lys-35 to |
| | Lys-41, Thr-50 to His-56, Thr-110 to Gly-119. |
| 783506 | Preferred epitopes include those comprising a sequence |
| | shown in SEQ ID NO. 826 as residues: Thr-3 to |
| | Thr-9. |
| 792139 | Preferred epitopes include those comprising a sequence |
| | shown in SEQ ID NO. 830 as residues: Arg-1 to |
| | Thr-13, Arg-21 to Pro-30, Ser-70 to Arg-79, |
| | Asp-89 to Arg-101. |
| 805715 | Preferred epitopes include those comprising a sequence |
| | shown in SEQ ID NO. 832 as residues: Met-7 to Ala-17, |
| | Arg-26 to Leu-32, Lys-47 to Lys-52, Asn-67 to Asn-72, |
| | Val-77 to Tyr-82, Pro-101 to Arg-107, Arg-137 to |
| | Arg-146, Ser-168 to Thr-173, Asp-189 to Lys-199. |
| 811111 | Preferred epitopes include those comprising a sequence |
| | shown in SEQ ID NO. 833 as residues: His-24 to |
| | Asn-31. |
| 811113 | Preferred epitopes include those comprising a sequence |
| | shown in SEQ ID NO. 834 as residues: Gln-1 to Ala-9, |
| | Cys-56 to Gly-61, Trp-105 to Thr-110, Arg-150 to |
| | Thr-155, Leu-189 to Lys-195. |
| 823902 | Preferred epitopes include those comprising a sequence |
| | shown in SEQ ID NO. 835 as residues: Thr-18 to |
| | Glu-23. |
| 826518 | Preferred epitopes include those comprising a sequence |
| | shown in SEQ ID NO. 836 as residues: Ile-20 to |
| | Lys-26, Cys-39 to Arg-46. |
| 826704 | Preferred epitopes include those comprising a sequence |
| | shown in SEQ ID NO. 837 as residues: His-14 to |
| | Phe-20, Glu-70 to Leu-83. |
| 828180 | Preferred epitopes include those comprising a sequence |
| | shown in SEQ ID NO. 840 as residues: Glu-38 to |
| | Arg-52, Ser-56 to Val-62. |
| 828658 | Preferred epitopes include those comprising a sequence |
| | shown in SEQ ID NO. 842 as residues: Asp-1 to |
| | Pro-12, Gly-59 to Lys-64, Asp-70 to Leu-76, Pro-160 |
| | to Pro-166, Thr-174 to Asn-179. |
| 828919 | Preferred epitopes include those comprising a sequence |
| | shown in SEQ ID NO. 843 as residues: Thr-49 to |
| | Val-54, Leu-83 to Lys-91, Gly-121 to Thr-130, |
| | Asp-165 to Glu-172, Thr-180 to Gly-188. |
| 830208 | Preferred epitopes include those comprising a sequence |
| | shown in SEQ ID NO. 846 as residues: Lys-49 to |
| | Asn-56, Glu-61 to Ala-67. |
| 830248 | Preferred epitopes include those comprising a sequence |
| | shown in SEQ ID NO. 847 as residues: Pro-17 to |
| | Asp-36, Pro-102 to Glu-108, Pro-122 to Lys-128, |
| | His-150 to Gly-155, Asn-162 to Tyr-168, Pro-186 |
| | to Gln-193, Ser-205 to Pro-211, Gln-305 to |
| | Gly-317. |
| 830275 | Preferred epitopes include those comprising a sequence |
| | shown in SEQ ID NO. 848 as residues: Ser-16 to |
| | Glu-22, Asn-45 to Ser-50, Thr-121 to Gly-136, |
| | Lys-150 to Arg-157, Ser-175 to Cys-181, |
| | Gly-198 to Ser-203. |
| 830286 | Preferred epitopes include those comprising a sequence |
| | shown in SEQ ID NO. 849 as residues: His-11 to |
| | Pro-18, Thr-241 to Thr-258, Ala-352 to Ala-365. |
| 830347 | Preferred epitopes include those comprising a sequence |
| | shown in SEQ ID NO. 850 as residues: Asp-33 to |
| | Ala-39. |
| 830348 | Preferred epitopes include those comprising a sequence |
| | shown in SEQ ID NO. 851 as residues: Gln-5 to |
| | Arg-15, Ile-96 to Asn-101, Asp-122 to Gly-128. |
| 830364 | Preferred epitopes include those comprising a sequence |
| | shown in SEQ ID NO. 852 as residues: Val-76 to |
| | Asn-82, Lys-87 to Tyr-94, Glu-118 to Gln-125, |
| | Pro-140 to Ile-145, Gly-149 to Pro-173, |
| | Ala-215 to Lys-222, Lys-230 to Gly-235, |
| | Pro-250 to Asn-256, Ser-302 to Arg-307, |
| | Ser-321 to Glu-332. |
| 830394 | Preferred epitopes include those comprising a sequence |
| | shown in SEQ ID NO. 853 as residues: Thr-37 to |
| | Thr-44, Leu-57 to Ser-63, Ser-74 to Lys-86, |
| | Gln-107 to Leu-112, Lys-140 to Ala-145, Asp-154 |
| | to Ser-163. |
| 830412 | Preferred epitopes include those comprising a sequence |
| | shown in SEQ ID NO. 855 as residues: His-65 to |
| | Gly-74, Asp-85 to Ser-97, Leu-133 to Glu-138, |
| | Glu-144 to Asp-153, Arg-170 to Ser-175, |
| | Gly-184 to Arg-189, Gln-202 to Tyr-208. |
| 830464 | Preferred epitopes include those comprising a sequence |
| | shown in SEQ ID NO. 857 as residues: Val-3 to |
| | Val-11, Gln-16 to Gln-27, Glu-41 to Asp-51. |
| 830471 | Preferred epitopes include those comprising a sequence |
| | shown in SEQ ID NO. 858 as residues: Glu-10 to |
| | His-22, Ser-37 to Lys-45. |
| 830477 | Preferred epitopes include those comprising a sequence |
| | shown in SEQ ID NO. 859 as residues: Lys-1 to |
| | Cys-13, Thr-32 to Cys-37, Ser-44 to Glu-50, |
| | Glu-57 to Asn-64, Glu-85 to Glu-93, |
| | Ala-129 to Ser-139, Gln-157 to Thr-185, |
| | Gln-199 to Gly-215, Ile-241 to Leu-247, |
| | Asp-254 to Leu-263, Gln-265 to Gln-270, |
| | Glu-298 to Gln-309, Glu-316 to Ala-321, |
| | Leu-325 to Glu-334, Glu-340 to Ser-345, |
| | Leu-348 to His-367, Lys-384 to Arg-91, |
| | Leu-409 to Asn-417, Arg-431 to Arg-437, |
| | Phe-441 to Leu-448, Ala-456 to Glu-484, |
| | Lys-509 to Val-519, Glu-521 to Asp-528, |
| | Asp-546 to Phe-553, Glu-558 to Phe-567, |
| | Pro-573 to Thr-588. |
| 830500 | Preferred epitopes include those comprising a sequence |
| | shown in SEQ ID NO. 860 as residues: Gln-27 to |
| | Gly-34. |
| 830509 | Preferred epitopes include those comprising a sequence |
| | shown in SEQ ID NO. 861 as residues: Pro-2 to |
| | Asp-7, Gln-13 to Gln-29, Pro-35 to Trp-41. |
| 830528 | Preferred epitopes include those comprising a sequence |
| | shown in SEQ ID NO. 862 as residues: Gln-1 to |
| | Arg-12, Asp-22 to Pro-44, Lys-52 to Asp-62, |
| | Pro-68 to Lys-93, Pro-99 to Pro-129, Ala-138 |
| | to Ser-150, Lys-156 to Val-194, |
| | Ile-197 to Glu-210, Ala-213 to Ala-287, |
| | Leu-289 to Lys-327, Lys-330 to Gly-340, |
| | Asp-344 to Gln-360, Ile-396 to Thr-401, |
| | Lys-409 to Asp-418, Met-450 to Ala-460, |
| | Glu-468 to Gly-475. |
| 830542 | Preferred epitopes include those comprising a sequence |
| | shown in SEQ ID NO. 863 as residues: Val-1 to |
| | Gly-10, Arg-24 to Asp-36, Leu-225 to |
| | Trp-231, Val-249 to Met-258, Glu-262 to |
| | Thr-269, Val-279 to Gly-284, Asp-307 to |
| | Asn-313, Arg-411 to Lys-416. |
| 830564 | Preferred epitopes include those comprising a sequence |
| | shown in SEQ ID NO. 864 as residues: Trp-103 to |
| | Glu-113, Lys-118 to Tyr-125. |
| 830611 | Preferred epitopes include those comprising a sequence |
| | shown in SEQ ID NO. 865 as residues: Glu-51 to |
| | Ser-57, Arg-128 to Ala-133. |
| 830620 | Preferred epitopes include those comprising a sequence |
| | shown in SEQ ID NO. 867 as residues: Lys-54 to |
| | Arg-59, Arg-66 to Arg-71. |
| 830630 | Preferred epitopes include those comprising a sequence |
| | shown in SEQ ID NO. 868 as residues: Pro-12 to |
| | Gly-17. |
| 830654 | Preferred epitopes include those comprising a sequence |
| | shown in SEQ ID NO. 869 as residues: Leu-1 to |
| | Asp-6. |
| 830660 | Preferred epitopes include those comprising a sequence |
| | shown in SEQ ID NO. 870 as residues: Lys-111 to |
| | Trp-116, Glu-139 to Gly-148, Arg-182 to |
| | Ser-189. |
| 830704 | Preferred epitopes include those comprising a sequence |
| | shown in SEQ ID NO. 872 as residues: Asn-1 to |
| | Glu-8, Ala-38 to Gly-46, Gln-58 to Asp-71, |
| | Ala-75 to Cys-103, Met-106 to |
| | Ala-140, Gln-153 to Ile-159. |
| 830765 | Preferred epitopes include those comprising a sequence |
| | shown in SEQ ID NO. 873 as residues: Ser-19 to |
| | Thr-26, Pro-47 to Thr-59. |
| 830778 | Preferred epitopes include those comprising a sequence |
| | shown in SEQ ID NO. 874 as residues: Asp-35 to |
| | Gly-40, Glu-104 to Glu-109, Ser-226 to Tyr-231. |
| 830784 | Preferred epitopes include those comprising a sequence |
| | shown in SEQ ID NO. 875 as residues: Pro-34 to |
| | Leu-41. |
| 830800 | Preferred epitopes include those comprising a sequence |
| | shown in SEQ ID NO. 876 as residues: Ser-16 to |
| | Lys-24, Gly-91 to Thr-96. |
| 830821 | Preferred epitopes include those comprising a sequence |
| | shown in SEQ ID NO. 877 as residues: Leu-2 to |
| | Thr-8, Asp-15 to Gly-26, Phe-64 to Ser-70, |
| | Pro-77 to Trp-82, Pro-85 to Lys-90. |
| 830849 | Preferred epitopes include those comprising a sequence |
| | shown in SEQ ID NO. 878 as residues: Leu-2 to |
| | Ser-18, Gly-31 to Ser-40, Asn-56 to Thr-86, |
| | Asp-114 to Arg-120. |
| 830903 | Preferred epitopes include those comprising a sequence |
| | shown in SEQ ID NO. 879 as residues: Thr-21 to |
| | Thr-33. |
| 830913 | Preferred epitopes include those comprising a sequence |
| | shown in SEQ ID NO. 880 as residues: Gly-48 to |
| | Pro-53, Gln-66 to Pro-74, Thr-151 to Gly-156, |
| | Asn-292 to Asn-97. |
| 830920 | Preferred epitopes include those comprising a sequence |
| | shown in SEQ ID NO. 881 as residues: Asp-15 to |
| | Ser-25, Ser-33 to Val-38, Lys-181 to Phe-187. |
| 830938 | Preferred epitopes include those comprising a sequence |
| | shown in SEQ ID NO. 882 as residues: Thr-65 to |
| | Asp-70, Leu-89 to Ala-95. |
| 831014 | Preferred epitopes include those comprising a sequence |
| | shown in SEQ ID NO. 884 as residues: Ala-2 to |
| | Gln-11, Glu-71 to Leu-78, Leu-89 to Trp-98, |
| | Ser-163 to Ala-170, Glu-261 to Asp-269, |
| | Phe-286 to Val-292. |
| 831026 | Preferred epitopes include those comprising a sequence |
| | shown in SEQ ID NO. 885 as residues: Lys-41 to |
| | Gly-46, Tyr-64 to Phe-75. |
| 831055 | Preferred epitopes include those comprising a sequence |
| | shown in SEQ ID NO. 887 as residues: Trp-37 to His-50, |
| | Lys-108 to Phe-114, Lys-131 to Thr-137, Arg-351 to |
| | Ser-356, Pro-363 to Cys-369, Glu-390 to Asp-397. |
| 831057 | Preferred epitopes include those comprising a sequence |
| | shown in SEQ ID NO. 888 as residues: Arg-1 to |
| | Gly-14, Thr-19 to Gly-25, Ala-31 to Ala-41, |
| | Glu-53 to Ile-62, Val-6 to Glu-75, |
| | Ser-103 to Asp-113, Ala-135 to Asp-140. |
| 831062 | Preferred epitopes include those comprising a sequence |
| | shown in SEQ ID NO. 889 as residues: Ser-24 to |
| | Ala-31. |
| 831117 | Preferred epitopes include those comprising a sequence |
| | shown in SEQ ID NO. 890 as residues: Lys-50 to |
| | Tyr-55. |
| 831122 | Preferred epitopes include those comprising a sequence |
| | shown in SEQ ID NO. 891 as residues: Phe-8 to |
| | Gly-14, Arg-58 to Gly-68, Lys-107 to Ser-131, |
| | Gln-151 to Val-160, Lys-180 to Lys-186, |
| | Lys-211 to Thr-223. |
| 831132 | Preferred epitopes include those comprising a sequence |
| | shown in SEQ ID NO. 893 as residues: Gly-1 to |
| | Ser-16. |
| 831152 | Preferred epitopes include those comprising a sequence |
| | shown in SEQ ID NO. 894 as residues: Ser-8 to |
| | Arg-13, Lys-59 to Ala-65, Glu-71 to Glu-86, |
| | Leu-98 to His-108, Arg-118 to |
| | Ile-126, His-138 to Ala-145, Pro-148 to |
| | Tyr-156, Pro-170 to Ala-175, Val-187 to |
| | Lys-194, Glu-206 to Val-217, Gly-221 to |
| | Ser-226, Asp-250 to Lys-255. |
| 831157 | Preferred epitopes include those comprising a sequence |
| | shown in SEQ ID NO. 895 as residues: Val-1 to |
| | Asn-11, Glu-13 to Gly-25, Ser-31 to Ala-49, |
| | Arg-61 to Gly-66, Ala-84 to Ala-90. |
| 831160 | Preferred epitopes include those comprising a sequence |
| | shown in SEQ ID NO. 896 as residues: His-1 to |
| | Ala-7, Asp-43 to Lys-52, Tyr-98 to Gly-103, |
| | Glu-118 to Leu-125, Phe-183 to |
| | Tyr-195, Gln-209 to Arg-220, Ile-257 to |
| | Gly-262, Glu-278 to Thr-284, Ile-09 to |
| | Pro-314, Leu-339 to Asp-347, Ala-358 to |
| | Gln-388, Gln-401 to Leu-414, Glu-425 to |
| | Ala-440, Ala-448 to Glu-453, Ile-460 to |
| | Gln-465, Glu-482 to Glu-492, Ala-498 to |
| | Glu-511, Pro-520 to Val-526, Gly-556 to |
| | Gln-577, Leu-587 to His-598, Glu-605 to |
| | Asp 30. |
| 831197 | Preferred epitopes include those comprising a sequence |
| | shown in SEQ ID NO. 898 as residues: Ser-28 to |
| | Leu-39, Phe-48 to Phe-55, Pro-60 to Gln-66, |
| | Arg-73 to Thr-78. |
| 831217 | Preferred epitopes include those comprising a sequence |
| | shown in SEQ ID NO. 899 as residues: Asp-52 to |
| | Val-63, Asn-75 to Glu-83. |
| 831248 | Preferred epitopes include those comprising a sequence |
| | shown in SEQ ID NO. 901 as residues: Pro-24 to |
| | Gly-34, Lys-108 to Arg-118. |
| 831369 | Preferred epitopes include those comprising a sequence |
| | shown in SEQ ID NO. 903 as residues: Ala-1 to |
| | Gly-8. |
| 831371 | Preferred epitopes include those comprising a sequence |
| | shown in SEQ ID NO. 904 as residues: Arg-39 to |
| | Ser-44, Arg-66 to Arg-76. |
| 831373 | Preferred epitopes include those comprising a sequence |
| | shown in SEQ ID NO. 905 as residues: Gly-7 to |
| | Ser-13, Gln-40 to Trp-45, Lys-109 to Gly-116, |
| | Gly-134 to Arg-141, Arg-149 to Arg-164, |
| | Arg-174 to Phe-181, Lys-202 to Lys-210, |
| | Glu-263 to Leu-272, Pro-274 to Leu-280, |
| | Glu-289 to Glu-296, Pro-334 to |
| | His-341, Tyr-413 to Pro-426, Glu-432 to |
| | Lys-449. |
| 831387 | Preferred epitopes include those comprising a sequence |
| | shown in SEQ ID NO. 906 as residues: Tyr-21 to |
| | Leu-28, Cys-51 to Phe-72, Ser-107 to Leu-113, |
| | Leu-125 to Leu-134, Ser-142 to Ala-152, |
| | His-159 to Tyr-164, Arg-276 to Val-290. |
| 831410 | Preferred epitopes include those comprising a sequence |
| | shown in SEQ ID NO. 907 as residues: Arg-7 to |
| | Lys-13, Pro-28 to Cys-34, Gly-100 to Asn-109, |
| | Cys-155 to Arg-162. |
| 831448 | Preferred epitopes include those comprising a sequence |
| | shown in SEQ ID NO. 908 as residues: Ala-10 to |
| | Cys-20, Tyr-36 to Lys-41, Asp-68 to Ala-75, |
| | Ala-84 to Arg-89, Glu-112 to Ser-119. |
| 831450 | Preferred epitopes include those comprising a sequence |
| | shown in SEQ ID NO. 909 as residues: Pro-23 to |
| | Gly-28, Thr-52 to Pro-63. |
| 831472 | Preferred epitopes include those comprising a sequence |
| | shown in SEQ ID NO. 910 as residues: Ser-16 to |
| | Ala-26. |
| 831473 | Preferred epitopes include those comprising a sequence |
| | shown in SEQ ID NO. 911 as residues: Arg-37 to |
| | Gln-42, Asn-59 to Asn-65, Asn-109 to Val-121, |
| | Arg-191 to Glu-199, Lys-205 to Ile-214. |
| 831474 | Preferred epitopes include those comprising a sequence |
| | shown in SEQ ID NO. 912 as residues: Glu-1 to |
| | Leu-8, Ser-50 to Arg-56, Thr-61 to Arg-66, |
| | Val-69 to Arg-82. |
| 831494 | Preferred epitopes include those comprising a sequence |
| | shown in SEQ ID NO. 913 as residues: Arg-21 to |
| | Ser-27, Arg-77 to Asp-82, Glu-116 to Ile-134, |
| | Ser-139 to Ser-162, Leu-167 to |
| | Gly-190, Cys-192 to Gly-205. |
| 831506 | Preferred epitopes include those comprising a sequence |
| | shown in SEQ ID NO. 914 as residues: Val-6 to |
| | Tyr-12, Lys-77 to Ala-82, Ser-102 to Arg-108, |
| | Ser-145 to Ser-151. |
| 831533 | Preferred epitopes include those comprising a sequence |
| | shown in SEQ ID NO. 915 as residues: Thr-9 to |
| | Cys-16, Arg-52 to Tyr-57, Ser-61 to Ser-69. |
| 831539 | Preferred epitopes include those comprising a sequence |
| | shown in SEQ ID NO. 916 as residues: Thr-32 to |
| | Arg-39, Cys-44 to Arg-60, Lys-65 to Gln-70, |
| | Gly-78 to Ile-86, Lys-126 to |
| | Thr-134, Leu-140 to Glu-148. |
| 831556 | Preferred epitopes include those comprising a sequence |
| | shown in SEQ ID NO. 917 as residues: Gly-45 to |
| | Asp-52. |
| 831598 | Preferred epitopes include those comprising a sequence |
| | shown in SEQ ID NO. 919 as residues: Asn-1 to |
| | Val-6, Phe-76 to Tyr-83, Gly-129 to |
| | Gln-135, Thr-145 to Asp-153, Pro-213 to |
| | Gln-220, Thr-230 to Asn-236, Lys-242 to Ala-248. |
| 831608 | Preferred epitopes include those comprising a sequence |
| | shown in SEQ ID NO. 920 as residues: Thr-23 to |
| | Pro-34, Glu-39 to Asp-83, Asn-89 to Lys-99, |
| | Asp-118 to Asp-128, Asn-135 to |
| | Glu-150, Glu-153 to Gly-168, Gly-181 to |
| | Thr-187, Arg-200 to Asp-205, Arg-273 to |
| | Ile-279, Thr-295 to Asp-300, Thr-316 |
| | to Cys-321. |
| 831613 | Preferred epitopes include those comprising a sequence |
| | shown in SEQ ID NO. 921 as residues: Pro-1 to |
| | Glu-7, Arg-9 to Phe-15, Thr-27 to Gly-34. |
| 831655 | Preferred epitopes include those comprising a sequence |
| | shown in SEQ ID NO. 926 as residues: Tyr-31 to |
| | Gln-38. |
| 831708 | Preferred epitopes include those comprising a sequence |
| | shown in SEQ ID NO. 927 as residues: Glu-22 to |
| | Ile-27, Gly-43 to Gly-49, His-83 to Arg-105. |
| 831741 | Preferred epitopes include those comprising a sequence |
| | shown in SEQ ID NO. 929 as residues: Asp-22 to |
| | Asp-27, Pro-64 to Gln-74, Ser-126 to Gly-131, |
| | Lys-134 to Arg-143, Arg-150 to Gly-162, |
| | Gln-180 to Tyr-196, Asp-209 to Leu-224, |
| | Gly-233 to Gly-241, Pro-246 to Arg-251. |
| 831754 | Preferred epitopes include those comprising a sequence |
| | shown in SEQ ID NO. 930 as residues: Arg-40 to |
| | Glu-50, Gly-57 to Gly-68, Phe-72 to Tyr-79. |
| 831760 | Preferred epitopes include those comprising a sequence |
| | shown in SEQ ID NO. 931 as residues: His-24 to |
| | Asp-39. |
| 831780 | Preferred epitopes include those comprising a sequence |
| | shown in SEQ ID NO. 932 as residues: Arg-92 to |
| | Thr-101. |
| 831796 | Preferred epitopes include those comprising a sequence |
| | shown in SEQ ID NO. 933 as residues: Pro-1 to Ser-8. |
| 831800 | Preferred epitopes include those comprising a sequence |
| | shown in SEQ ID NO. 934 as residues: Asp-1 to |
| | Ser-6, Glu-16 to Ser-26, Lys-66 to Pro-76, |
| | Leu-93 to Arg-99, Val-153 to Lys-164, |
| | Glu-177 to Asp-183, Ser-188 to Leu-193, |
| | Arg-210 to Ser-220, Thr-229 to Ser-244, |
| | Pro-283 to Phe-297. |
| 831813 | Preferred epitopes include those comprising a sequence |
| | shown in SEQ ID NO. 937 as residues: Pro-20 to |
| | Ala-30. |
| 831830 | Preferred epitopes include those comprising a sequence |
| | shown in SEQ ID NO. 938 as residues: Arg-12 to |
| | Lys-17, Gln-51 to Phe-60, Asp-97 to Trp-102, |
| | Glu-132 to Cys-137, Asp-160 to Leu-168, |
| | Glu-210 to Gln-219, Lys-302 to Pro-308, |
| | Phe-416 to Asp-421, Leu-444 to Leu-449, |
| | Val-457 to Asn-464, Leu-466 to Trp-472, |
| | Ile-474 to Trp-480, Ser-527 to Ser-533, |
| | Pro-558 to Phe-565, Ile-578 to Trp-584, |
| | Asp-614 to Asp-627, Asn-698 to Asp-710, |
| | Pro-738 to Ser-744. |
| 831860 | Preferred epitopes include those comprising a sequence |
| | shown in SEQ ID NO. 939 as residues: Pro-19 to |
| | Tyr-25. |
| 831896 | Preferred epitopes include those comprising a sequence |
| | shown in SEQ ID NO. 941 as residues: Ser-18 to |
| | Phe-30, Leu-34 to Asn-41, Ala-48 to Tyr-56, |
| | Leu-103 to Ala-110, Asp-124 to Val-130, |
| | Ile-141 to Leu-150, Leu-188 to Ser-196, |
| | Glu-229 to Asn-238, Thr-248 to Cys-259. |
| 831928 | Preferred epitopes include those comprising a sequence |
| | shown in SEQ ID NO. 942 as residues: Asn-55 to |
| | Asp-60. |
| 831949 | Preferred epitopes include those comprising a sequence |
| | shown in SEQ ID NO. 943 as residues: Arg-1 to |
| | Glu-9, Glu-19 to Arg-32, Ala-77 to Thr-90, |
| | Thr-95 to Thr-104, Lys-106 to Ser-119, |
| | Leu-136 to Arg-141, Tyr-165 to Asn-174. |
| 831950 | Preferred epitopes include those comprising a sequence |
| | shown in SEQ ID NO. 944 as residues: Ser-18 to |
| | Glu-26, Phe-93 to Arg-102, Leu-137 to Gln-143, |
| | Pro-148 to Gly-157. |
| 831975 | Preferred epitopes include those comprising a sequence |
| | shown in SEQ ID NO. 946 as residues: His-41 to |
| | Thr-48. |
| 832047 | Preferred epitopes include those comprising a sequence |
| | shown in SEQ ID NO. 948 as residues: Arg-57 to |
| | Glu-62, Pro-73 to Gly-80. |
| 832078 | Preferred epitopes include those comprising a sequence |
| | shown in SEQ ID NO. 949 as residues: Pro-14 to |
| | Leu-21, Cys-34 to Gly-39. |
| 832100 | Preferred epitopes include those comprising a sequence |
| | shown in SEQ ID NO. 950 as residues: Tyr-37 to |
| | Val-45. |
| 832104 | Preferred epitopes include those comprising a sequence |
| | shown in SEQ ID NO. 951 as residues: Thr-1 to |
| | Ser-6, Arg-14 to Cys-20. |
| 832279 | Preferred epitopes include those comprising a sequence |
| | shown in SEQ ID NO. 954 as residues: Ser-28 to |
| | Pro-34, Pro-134 to Ser-139, Gln-178 to Gly-183, |
| | Thr-193 to Gly-198, His-244 to Gly-257, |
| | Asp-263 to Tyr-273, Lys-337 to Arg-347, |
| | Pro-366 to Lys-372, Ala-382 to Asp-387. |
| 832317 | Preferred epitopes include those comprising a sequence |
| | shown in SEQ ID NO. 955 as residues: Thr-32 to |
| | Gln-39, Asn-58 to Trp-71, Glu-96 to Trp-108, |
| | Cys-126 to Gly-133. |
| 832364 | Preferred epitopes include those comprising a sequence |
| | shown in SEQ ID NO. 957 as residues: Glu-2 to |
| | Met-9, Asp-17 to Asn-22, Leu-27 to Val-35. |
| 832428 | Preferred epitopes include those comprising a sequence |
| | shown in SEQ ID NO. 960 as residues: Arg-35 to |
| | Gly-41. |
| 832485 | Preferred epitopes include those comprising a sequence |
| | shown in SEQ ID NO. 961 as residues: Ser-121 to |
| | Cys-127. |
| 832494 | Preferred epitopes include those comprising a sequence |
| | shown in SEQ ID NO. 962 as residues: Ser-10 to |
| | Leu-28, Ser-31 to Asp-40, Ser-55 to Thr-62, |
| | Thr-94 to Asn-102, Asp-124 to Phe-135, |
| | Asn-175 to Lys-193, Glu-238 to Leu-243, |
| | Val-250 to Ala-259, Lys-291 to Asn-308, |
| | Ser-318 to Gly-327, Lys-335 to Asp-346, |
| | Tyr-404 to Ile-410, Gln-20 to Gln-430, |
| | Thr-476 to Phe-482, Pro-536 to Val-561, |
| | Tyr-563 to Leu-568. |
| 832512 | Preferred epitopes include those comprising a sequence |
| | shown in SEQ ID NO. 963 as residues: Arg-1 to |
| | Ala-7, Leu-9 to Ser-24, Glu-32 to Asp-43, |
| | Glu-71 to Glu-86, Val-92 to Ile-104, |
| | Asp-143 to Ser-154, Lys-190 to Glu-202, |
| | Glu-218 to Lys-241. |
| 832515 | Preferred epitopes include those comprising a sequence |
| | shown in SEQ ID NO. 964 as residues: Glu-3 to Gly-12, |
| | Arg-20 to Gln-30, Leu-34 to Gln-39, Asp-51 to |
| | Arg-58, Gln-69 to Val-77, Gly-105 to Lys-117, |
| | Cys-123 to Phe-132. |
| 832526 | Preferred epitopes include those comprising a sequence |
| | shown in SEQ ID NO. 965 as residues: Pro-15 to |
| | Asn-25, Glu-48 to Phe-59. |
| 832575 | Preferred epitopes include those comprising a sequence |
| | shown in SEQ ID NO. 966 as residues: Thr-24 to |
| | Arg-29, Ala-55 to Tyr-60, Tyr-77 to Asp-89, |
| | Leu-108 to Gly-115, Thr-142 to Gly-149. |
| 832576 | Preferred epitopes include those comprising a sequence |
| | shown in SEQ ID NO. 967 as residues: Arg-1 to |
| | Leu-11, Pro-21 to Gly-28, Pro-37 to His-47, |
| | Lys-79 to Gln-88, Pro-108 to Gly-116, |
| | Pro-179 to Thr-188, Arg-207 to Asn-213. |
| 832634 | Preferred epitopes include those comprising a sequence |
| | shown in SEQ ID NO. 969 as residues: Leu-2 to |
| | Ser-12, Pro-125 to Asp-133. |
| 832728 | Preferred epitopes include those comprising a sequence |
| | shown in SEQ ID NO. 970 as residues: Gln-16 to |
| | Gly-32, Leu-100 to Gly-106, Gly-118 to Lys-132, |
| | Pro-156 to Leu 162. |
| 833395 | Preferred epitopes include those comprising a sequence |
| | shown in SEQ ID NO. 972 as residues: Ser-3 to |
| | Gly-9. |
| 834326 | Preferred epitopes include those comprising a sequence |
| | shown in SEQ ID NO. 973 as residues: Ser-1 to |
| | Trp-19, Asn-148 to Leu-153, Tyr-235 to Trp-244. |
| 834944 | Preferred epitopes include those comprising a sequence |
| | shown in SEQ ID NO. 975 as residues: Glu-42 to |
| | Gln-51, Pro-115 to Asp-120, Arg-127 to Gly-133, |
| | Gln-199 to Gln-11. |
| 835104 | Preferred epitopes include those comprising a sequence |
| | shown in SEQ ID NO. 977 as residues: Thr-1 to |
| | Arg-14, Val-18 to Pro-23, Thr-37 to Met-44, |
| | Gln-51 to Leu-57. |
| 835332 | Preferred epitopes include those comprising a sequence |
| | shown in SEQ ID NO. 978 as residues: Thr-1 to |
| | Glu-13, Arg-135 to Asp-142, Thr-150 to |
| | Gln-155, Cys-173 to Cys-183, Cys-203 to |
| | Asp-214. |
| 835487 | Preferred epitopes include those comprising a sequence |
| | shown in SEQ ID NO. 979 as residues: Ala-13 to |
| | Arg-22, Pro-43 to Glu-57, Ala-73 to Pro-90, |
| | Arg-102 to Ser-109, Pro-114 to Gly-122, |
| | Arg-127 to Arg-138, Glu-153 to Gly-158, |
| | Pro-165 to Pro-171, Gly-185 to Arg-190, |
| | Pro-211 to Pro-216, Glu-231 to Asn-261, |
| | Ala-280 to Pro-291, Pro-303 to Gly-311, |
| | Arg-313 to Gly-326, Ala-358 to Ala-364, |
| | Pro-369 to Gly-377, Pro-390 to Gly-407, |
| | Tyr-420 to Tyr-441, Glu-461 to Thr-470, |
| | Pro-479 to Trp-487, Asp-489 to Cys-494, |
| | Gln-515 to Lys-532, Ala-572 to Asn-582, |
| | Asp-588 to Leu-594, Cys-625 to Trp-632, |
| | Tyr-639 to Arg-646. |
| 836182 | Preferred epitopes include those comprising a sequence |
| | shown in SEQ ID NO. 980 as residues: Ala-7 to |
| | Thr-17, Arg-31 to Thr-36. |
| 836522 | Preferred epitopes include those comprising a sequence |
| | shown in SEQ ID NO. 981 as residues: Gly-59 to |
| | Cys-65. |
| 836789 | Preferred epitopes include those comprising a sequence |
| | shown in SEQ ID NO. 984 as residues: Gly-18 to |
| | Gly-25, Glu-59 to Glu-64. |
| 838577 | Preferred epitopes include those comprising a sequence |
| | shown in SEQ ID NO. 985 as residues: Pro-15 to |
| | Trp-20, Pro-46 to Gln-57, Glu-68 to Phe-83. |
| 839008 | Preferred epitopes include those comprising a sequence |
| | shown in SEQ ID NO. 987 as residues: Arg-1 to |
| | Arg-13, Gln-125 to Glu-131, Asn-137 to Val-142, |
| | Gly-183 to Tyr-188, Asn-245 to Ser-251, |
| | Gln-302 to Asn-311. |
| 840063 | Preferred epitopes include those comprising a sequence |
| | shown in SEQ ID NO. 988 as residues: Gly-1 to |
| | Gly-31. |
| 840533 | Preferred epitopes include those comprising a sequence |
| | shown in SEQ ID NO. 989 as residues: Thr-16 to |
| | Pro-23, Pro-39 to Trp-48, Arg-50 to Lys-55, |
| | Gly-73 to Gly-79. |
| 840669 | Preferred epitopes include those comprising a sequence |
| | shown in SEQ ID NO. 990 as residues: Met-27 to |
| | Gln-33, Gln-49 to Gly-56, Thr-63 to Leu-70, |
| | Thr-115 to Arg-127, Pro-174 to Asn-184. |
| 841140 | Preferred epitopes include those comprising a sequence |
| | shown in SEQ ID NO. 991 as residues: Arg-17 to |
| | Phe-24, Pro-113 to Gly-121, Thr-235 to Met-240. |
| 841386 | Preferred epitopes include those comprising a sequence |
| | shown in SEQ ID NO. 992 as residues: Val-58 to |
| | Met-66, Pro-134 to Lys-143, Tyr-163 to Ala-170, |
| | Val-178 to Lys-187, Pro-207 to Gly-212. |
| 841900 | Preferred epitopes include those comprising a sequence |
| | shown in SEQ ID NO. 996 as residues: Ile-2 to |
| | Phe-12. |
| 842054 | Preferred epitopes include those comprising a sequence |
| | shown in SEQ ID NO. 997 as residues: Asp-27 to |
| | Trp-32, Pro-89 to Glu-99, Arg-112 to Lys-123. |
| 843061 | Preferred epitopes include those comprising a sequence |
| | shown in SEQ ID NO. 998 as residues: Leu-3 to |
| | Gly-18, His-36 to His-57, Lys-136 to Leu-145, |
| | Gly-174 to Trp-184, Lys-188 to Tyr-196, |
| | Lys-204 to Asp-211, Pro-293 to Ser-305, |
| | Glu-321 to Asp-333, Gly-342 to Lys-348, |
| | Ala-371 to Asp-377, Asp-439 to Leu-449, |
| | Ala-521 to Gly-529, Tyr-583 to Trp-599, |
| | Asn-639 to Ser-644, Leu-738 to Leu-745. |
| 843544 | Preferred epitopes include those comprising a sequence |
| | shown in SEQ ID NO. 999 as residues: Tyr-11 to |
| | Phe-18, Ser-34 to Lys-43. |
| 844092 | Preferred epitopes include those comprising a sequence |
| | shown in SEQ ID NO. 1000 as residues: Gln-1 to |
| | Lys-6, Glu-30 to Glu-37, Glu-40 to Thr-53. |
| 844270 | Preferred epitopes include those comprising a sequence |
| | shown in SEQ ID NO. 1001 as residues: Thr-10 to |
| | Gly-20, Pro-44 to Thr-50. |
| 844604 | Preferred epitopes include those comprising a sequence |
| | shown in SEQ ID NO. 1002 as residues: Gly-8 to |
| | Phe-20, Pro-23 to Arg-43, Asp-62 to Asp-67, |
| | Pro-73 to Asn-80, Val-83 to Phe-95, Glu-103 to |
| | Ile-109, Tyr-120 to Ala-125, Thr-176 to Thr-183, |
| | Pro-200 to Pro-214, Pro-232 to Met-240, |
| | Gln-248 to Asp-292, Arg-297 to Ser-310, |
| | Pro-320 to Glu-332, Glu-347 to Ser-390, |
| | Ala-392 to Pro-404, Pro-425 to Gly-435, |
| | Pro-438 to Gly-443, Gly-467 to Pro-480, |
| | Pro-486 to Pro-499, Pro-506 to Met-512, |
| | Pro-572 to Glu-580, Arg-592 to Gly-597, |
| | Ala-601 to Ser-610, Ala-618 to Pro-623. |
| 844685 | Preferred epitopes include those comprising a sequence |
| | shown in SEQ ID NO. 1003 as residues: Ser-14 to |
| | Ser-19, Pro-25 to Gly-32, Asn-98 to Lys-108. |
| 844855 | Preferred epitopes include those comprising a sequence |
| | shown in SEQ ID NO. 1004 as residues: Ala-9 to |
| | Ser-15, Pro-21 to Arg-26. |
| 845101 | Preferred epitopes include those comprising a sequence |
| | shown in SEQ ID NO. 1005 as residues: Ala-2 to |
| | Gly-13, Pro-31 to Pro-42, Gln-89 to Tyr-95, |
| | Gln-169 to Leu-189. |
| 845141 | Preferred epitopes include those comprising a sequence |
| | shown in SEQ ID NO. 1006 as residues: Gly-13 to |
| | Met-26, Arg-34 to Gly-39, Ile-60 to Ser-80, |
| | Ala-85 to Thr-98. |
| 845220 | Preferred epitopes include those comprising a sequence |
| | shown in SEQ ID NO. 1007 as residues: Pro-14 to |
| | Gly-24, Glu-33 to Ala-39, Asp-145 to Pro-168, |
| | Ala-238 to Arg-250, Pro-258 to Phe-269, |
| | Arg-285 to Pro-290, Ala-340 to Cys-364. |
| 845434 | Preferred epitopes include those comprising a sequence |
| | shown in SEQ ID NO. 1008 as residues: Ala-1 to |
| | Glu-7, Gln-29 to Phe-34, Gly-67 to Ala-75, |
| | Gln-78 to Leu-83, Asn-96 to Ile-109, |
| | Thr-144 to Trp-151. |
| 845510 | Preferred epitopes include those comprising a sequence |
| | shown in SEQ ID NO. 1009 as residues: Arg-79 to |
| | Leu-86, Met-114 to Asp-122, Leu-129 to Leu-134, |
| | Gln-145 to Arg-152. |
| 845600 | Preferred epitopes include those comprising a sequence |
| | shown in SEQ ID NO. 1010 as residues: Ala-22 to |
| | Phe-28. |
| 845882 | Preferred epitopes include those comprising a sequence |
| | shown in SEQ ID NO. 1011 as residues: Ala-1 to |
| | Gly-7, Arg-29 to Lys-35, Lys-72 to Ala-79, |
| | Leu-94 to Val-101, Gly-137 to Asn-142, |
| | Arg-l45 to Leu-150, Gly-150 to Lys-187, |
| | Glu-194 to Gly-208, Arg-257 to Ser-267, |
| | Ser-278 to Asp-290, Gly-312 to Ser-319, |
| | Leu-338 to Lys-351, Tyr-358 to Ser-363. |
| 846007 | Preferred epitopes include those comprising a sequence |
| | shown in SEQ ID NO. 1012 as residues: Tyr-16 to |
| | Ala-24, Arg-59 to Ser-66, Thr-78 to Glu-83, |
| | Glu-90 to Ser-103, Gln-108 to Thr-113, |
| | Ser-115 to Cys-124. |
| HCRNG17R | Preferred epitopes include those comprising a sequence |
| | shown in SEQ ID NO. 1016 as residues: Pro-16 to |
| | Asp-21. |
| HWMFG64R | Preferred epitopes include those comprising a sequence |
| | shown in SEQ ID NO. 1017 as residues: Ser-70 to |
| | Asp-76, Lys-87 to Leu-95. |
| HAGCZ94R | Preferred epitopes include those comprising a sequence |
| | shown in SEQ ID NO. 1018 as residues: Val-3 to |
| | Lys-9. |
| HBJEJ74R | Preferred epitopes include those comprising a sequence |
| | shown in SEQ ID NO. 1019 as residues: Pro-1 to |
| | Asp-8. |
| HUTHM43R | Preferred epitopes include those comprising a sequence |
| | shown in SEQ ID NO. 1021 as residues: Pro-7 to |
| | Arg-15. |
| HLTGU75R | Preferred epitopes include those comprising a sequence |
| | shown in SEQ ID NO. 1022 as residues: Ser-1 to |
| | Gly-11. |
| HWLKF77R | Preferred epitopes include those comprising a sequence |
| | shown in SEQ ID NO. 1023 as residues: Leu-10 to |
| | Asn-28. |
| HWLGX29R | Preferred epitopes include those comprising a sequence |
| | shown in SEQ ID NO. 1027 as residues: Val-3 to |
| | Ile-10, Pro-34 to Gln-40. |
| HWMFZ29R | Preferred epitopes include those comprising a sequence |
| | shown in SEQ ID NO. 1028 as residues: Leu-7 to |
| | Leu-13. |
| H6EEP19R | Preferred epitopes include those comprising a sequence |
| | shown in SEQ ID NO. 1030 as residues: Ala-1 to |
| | Trp-8, Lys-10 to Asp-27. |
| HJMAM83R | Preferred epitopes include those comprising a sequence |
| | shown in SEQ ID NO. 1031 as residues: Ser-1 to |
| | Val-11, Glu-19 to Ala-29, Asp-52 to Ala-68, |
| | Gly-78 to Lys-94. |
| HAGHF58R | Preferred epitopes include those comprising a sequence |
| | shown in SEQ ID NO. 1032 as residues: Lys-1 to |
| | Val-7. |
| HDPHG48R | Preferred epitopes include those comprising a sequence |
| | shown in SEQ ID NO. 1033 as residues: Gly-24 to |
| | Lys-34. |
| HCDMC32R | Preferred epitopes include those comprising a sequence |
| | shown in SEQ ID NO. 1038 as residues: Pro-2 to |
| | Arg-17, Lys-36 to Pro-47, Phe-61 to Trp-68, |
| | Gln-72 to Ala-86. |
| HTEQO80R | Preferred epitopes include those comprising a sequence |
| | shown in SEQ ID NO. 1040 as residues: Gly-1 to |
| | Val-15, Pro-17 to Pro-23, Leu-32 to Met-41, |
| | Lys-102 to His-109. |
| H2LAR08R | Preferred epitopes include those comprising a sequence |
| | shown in SEQ ID NO. 1043 as residues: Asn-58 to |
| | Gly-64. |
| HWMFN58R | Preferred epitopes include those comprising a sequence |
| | shown in SEQ ID NO. 1046 as residues: Glu-6 to |
| | Asn-14, Arg-22 to Asp-31, Gly-49 to Thr-56. |
| HUFBP63R | Preferred epitopes include those comprising a sequence |
| | shown in SEQ ID NO. 1049 as residues: Pro-1 to |
| | Gln-8, Thr-57 to Gly-64, Arg-69 to Arg-74, |
| | Gly-80 to Asp-91, Asp-105 to Gln-110, |
| | Arg-130 to Tyr-148. |
| HUFBN90R | Preferred epitopes include those comprising a sequence |
| | shown in SEQ ID NO. 1050 as residues: Glu-34 to |
| | Ala-40, Arg-111 to Ala-116. |
| HFKHD61R | Preferred epitopes include those comprising a sequence |
| | shown in SEQ ID NO. 1054 as residues: Arg-11 to |
| | Gly-38, Arg-44 to Glu-50, Gln-53 to Lys-67. |
| HTXNL13R | Preferred epitopes include those comprising a sequence |
| | shown in SEQ ID NO. 1057 as residues: Ser-48 to |
| | Arg-57, Glu-89 to Pro-95, Ser-102 to Asn-107. |
| H2LAK62R | Preferred epitopes include those comprising a sequence |
| | shown in SEQ ID NO. 1059 as residues: Pro-20 to |
| | Ser-25. |
| HATAR77R | Preferred epitopes include those comprising a sequence |
| | shown in SEQ ID NO. 1061 as residues: Gly-2 to |
| | Arg-16. |
| HWMEH18R | Preferred epitopes include those comprising a sequence |
| | shown in SEQ ID NO. 1066 as residues: Gln-61 to |
| | Ser-67. |
| HCNDP66R | Preferred epitopes include those comprising a sequence |
| | shown in SEQ ID NO. 1068 as residues: Leu-8 to |
| | Arg-15, Gln-46 to Pro-54. |
| HCRMK82R | Preferred epitopes include those comprising a sequence |
| | shown in SEQ ID NO. 1069 as residues: Ser-32 to |
| | Arg-38, Ala-72 to Lys-79, Arg-103 to Phe-111. |
| HSSGC52R | Preferred epitopes include those comprising a sequence |
| | shown in SEQ ID NO. 1075 as residues: Gly-1 to |
| | Pro-6, Arg-25 to Ile-30. |
| HCYBN49R | Preferred epitopes include those comprising a sequence |
| | shown in SEQ ID NO. 1076 as residues: Gly-16 to |
| | Gly-21, Ile-99 to Gln-109. |
| HWMGB90R | Preferred epitopes include those comprising a sequence |
| | shown in SEQ ID NO. 1077 as residues: Gly-1 to |
| | Ala-7, Asp-17 to Arg-27, Glu-32 to Leu-40. |
| HTEAW21R | Preferred epitopes include those comprising a sequence |
| | shown in SEQ ID NO. 1078 as residues: Glu-1 to |
| | Gly-6, Gln-19 to Leu-37. |
| H2LAQ68R | Preferred epitopes include those comprising a sequence |
| | shown in SEQ ID NO. 1082 as residues: Val-2 to |
| | Trp-10, Leu-25 to Lys-33. |
| HBAAD60R | Preferred epitopes include those comprising a sequence |
| | shown in SEQ ID NO. 1087 as residues: Pro-1 to |
| | Lys-32. |
| HCROA35R | Preferred epitopes include those comprising a sequence |
| | shown in SEQ ID NO. 1088 as residues: Gly-6 to |
| | Lys-12. |
| HCROM64R | Preferred epitopes include those comprising a sequence |
| | shown in SEQ ID NO. 1089 as residues: Asn-1 to |
| | Arg-7. |
| HKBAG82R | Preferred epitopes include those comprising a sequence |
| | shown in SEQ ID NO. 1091 as residues: Pro-9 to |
| | Gly-28. |
| HUTSB76R | Preferred epitopes include those comprising a sequence |
| | shown in SEQ ID NO. 1092 as residues: Lys-1 to |
| | Ser-17. |
| HWLJS67R | Preferred epitopes include those comprising a sequence |
| | shown in SEQ ID NO. 1093 as residues: Gln-3 to |
| | Lys-18, Gln-44 to Glu-49. |
| HTGAZ53R | Preferred epitopes include those comprising a sequence |
| | shown in SEQ ID NO. 1098 as residues: Ser-1 to |
| | Ala-16, Gln-36 to Thr-48. |
| HWLLL51R | Preferred epitopes include those comprising a sequence |
| | shown in SEQ ID NO. 1100 as residues: Gln-6 to |
| | Gly-18. |
| HWLJZ72R | Preferred epitopes include those comprising a sequence |
| | shown in SEQ ID NO. 1103 as residues: Ile-1 to |
| | Ser-19. |
| HWMFG06R | Preferred epitopes include those comprising a sequence |
| | shown in SEQ ID NO. 1104 as residues: Arg-1 to |
| | Lys-14, Gln-40 to Glu-45, Arg-65 to Arg-80. |
| HPRTO65R | Preferred epitopes include those comprising a sequence |
| | shown in SEQ ID NO. 1105 as residues: Thr-12 to |
| | Thr-17, Cys-35 to Ser-40. |
| HTJFDC01R | Preferred epitopes include those comprising a sequence |
| | shown in SEQ ID NO. 1106 as residues: Pro-11 to |
| | Glu-26. |
| HWLHY44R | Preferred epitopes include those comprising a sequence |
| | shown in SEQ ID NO. 1107 as residues: Pro-14 to |
| | Gln-24, Cys-34 to Leu-39, Thr-72 to Val-77, |
| | Glu-94 to Thr-99, Asp-101 to Met-107, |
| | Lys-109 to Pro-116. |
| HWLGR92R | Preferred epitopes include those comprising a sequence |
| | shown in SEQ ID NO. 1108 as residues: Pro-17 to |
| | Gly-22. |
| HCNCQ71R | Preferred epitopes include those comprising a sequence |
| | shown in SEQ ID NO. 1109 as residues: Glu-22 to |
| | Leu-30. |
| HWLEN11R | Preferred epitopes include those comprising a sequence |
| | shown in SEQ ID NO. 1111 as residues: Pro-6 to |
| | Lys-21, Ala-26 to Val-34, Lys-37 to Ser-46. |
| HWLEH56R | Preferred epitopes include those comprising a sequence |
| | shown in SEQ ID NO. 1116 as residues: Thr-23 to |
| | Ala-28, Asn-88 to Trp-98, Cys-114 to Asp-131. |
| H2LAD26R | Preferred epitopes include those comprising a sequence |
| | shown in SEQ ID NO. 1117 as residues: Pro-20 to |
| | Gly-31. |
| H2LAK66R | Preferred epitopes include those comprising a sequence |
| | shown in SEQ ID NO. 1125 as residues: Pro-33 to |
| | Leu-39, Glu-54 to Val-59, Gly-69 to Ser-76. |
| HSDKC65R | Preferred epitopes include those comprising a sequence |
| | shown in SEQ ID NO. 1126 as residues: Asn-32 to |
| | Pro-39, Pro-41 to Pro-49. |
| H2LAK52R | Preferred epitopes include those comprising a sequence |
| | shown in SEQ ID NO. 1127 as residues: Pro-20 to |
| | Ala-28. |
| HKAEG12R | Preferred epitopes include those comprising a sequence |
| | shown in SEQ ID NO. 1128 as residues: Asp-47 to |
| | Lys-52. |
| HKADP43R | Preferred epitopes include those comprising a sequence |
| | shown in SEQ ID NO. 1129 as residues: Pro-7 to |
| | Pro-15, Arg-35 to Val-44. |
| HUSJE17R | Preferred epitopes include those comprising a sequence |
| | shown in SEQ ID NO. 1131 as residues: Pro-26 to |
| | Gln-32. |
| HHBEF06R | Preferred epitopes include those comprising a sequence |
| | shown in SEQ ID NO. 1133 as residues: Pro-1 to |
| | Gly-6. |
| HISCW28R | Preferred epitopes include those comprising a sequence |
| | shown in SEQ ID NO. 1134 as residues: Pro-26 to |
| | Gln-32. |
| HPIAK29R | Preferred epitopes include those comprising a sequence |
| | shown in SEQ ID NO. 1137 as residues: Thr-1 to |
| | Tyr-7. |
| HUFAR71R | Preferred epitopes include those comprising a sequence |
| | shown in SEQ ID NO. 1138 as residues: Pro-26 to |
| | Gln-32. |
| HOECI21R | Preferred epitopes include those comprising a sequence |
| | shown in SEQ ID NO. 1141 as reidues: Asn-11 to |
| | Pro-20, Pro-22 to Thr-30, Glu-49 to Glu-70, |
| | Ser-84 to Thr-96, Thr-108 to Thr-113. |
| HMCAR63R | Preferred epitopes include those comprising a sequence |
| | shown in SEQ ID NO. 1143 as residues: Ala-1 to |
| | Gly-9, Lys-41 to Glu-47, Asn-65 to Gly-70, |
| | Glu-85 to Asp-93, Glu-103 to Tyr-109. |
| HAICY55R | Preferred epitopes include those comprising a sequence |
| | shown in SEQ ID NO. 1152 as residues: Glu-2 to |
| | His-9. |
| HWLIA38R | Preferred epitopes include those comprising a sequence |
| | shown in SEQ ID NO. 1153 as residues: Arg-60 to |
| | Gly-74, Ser-80 to Ile-88, Leu-92 to Ser-98. |
| HBXCL69R | Preferred epitopes include those comprising a sequence |
| | shown in SEQ ID NO. 1154 as residues: Ser-2 to |
| | Cys-8, Pro-10 to Leu-17. |
| H2LAP90R | Preferred epitopes include those comprising a sequence |
| | shown in SEQ ID NO. 1155 as residues: Thr-3 to |
| | Gln-9, Asn-11 to Pro-19, Gln-35 to Glu-42. |
| HTELE03R | Preferred epitopes include those comprising a sequence |
| | shown in SEQ ID NO. 1157 as residues: Asp-1 to |
| | Gln-9, Asn-11 to Arg-16, Cys-28 to Ser-44, |
| | Gln-50 to Gln-56. |
| HJMBNS6R | Preferred epitopes include those comprising a sequence |
| | shown in SEQ ID NO. 1158 as residues: Ser-31 to |
| | Glu-47. |
| HSKJC32R | Preferred epitopes include those comprising a sequence |
| | shown in SEQ ID NO. 1159 as residues: Gln-151 to |
| | Glu-158, Glu-168 to Pro-173, Ser-188 to Ile-195. |
| HAOAG76R | Preferred epitopes include those comprising a sequence |
| | shown in SEQ ID NO. 1161 as residues: Gly-1 to |
| | Ala-14. |
| HCIAD45R | Preferred epitopes include those comprising a sequence |
| | shown in SEQ ID NO. 1162 as residues: Pro-1 to |
| | Lys-23, Pro-43 to Leu-49. |
| H2MAC82R | Preferred epitopes include those comprising a sequence |
| | shown in SEQ ID NO. 1163 as residues: Lys-54 to |
| | Lys-59. |
| H2LAJ41R | Preferred epitopes include those comprising a sequence |
| | shown in SEQ ID NO. 1164 as residues: Met-20 to |
| | Val-36, Ser-82 to Lys-93, Pro-101 to Arg-106. |
| HBJFH33R | Preferred epitopes include those comprising a sequence |
| | shown in SEQ ID NO. 1166 as residues: Gly-10 to |
| | Tyr-26, Asn-29 to Leu-37, Thr-52 to His-59. |
| HISDV92R | Preferred epitopes include those comprising a sequence |
| | shown in SEQ ID NO. 1167 as residues: Pro-3 to |
| | Ser-8, Asn-48 to Tyr-54. |
| HE9QB35R | Preferred epitopes include those comprising a sequence |
| | shown in SEQ ID NO. 1169 as residues: Gly-1 to |
| | Asp-6, Pro-20 to Gln-33, Tyr-46 to Arg-52, |
| | Asn-72 to Lys-85, Gln-91 to Ala-110. |
| HDABQ50R | Preferred epitopes include those comprising a sequence |
| | shown in SEQ ID NO. 1170 as residues: Ser-9 to |
| | Lys-17, Lys-41 to Arg-46. |
| HTPAC28R | Preferred epitopes include those comprising a sequence |
| | shown in SEQ ID NO. 1176 as residues: Lys-10 to |
| | Thr-15, Thr-17 to Leu-23. |
| HMCGN07R | Preferred epitopes include those comprising a sequence |
| | shown in SEQ ID NO. 1177 as residues: Asn-88 to |
| | Ser-98, Pro-123 to Val-129. |
| HBMVM66R | Preferred epitopes include those comprising a sequence |
| | shown in SEQ ID NO. 1180 as residues: Ser-2 to |
| | Gly-7, Arg-10 to Phe-24, Ala-36 to Arg-41. |
| HEPNA09R | Preferred epitopes include those comprising a sequence |
| | shown in SEQ ID NO. 1186 as residues: Ser-1 to |
| | Pro-6. |
| HCNDR62R | Preferred epitopes include those comprising a sequence |
| | shown in SEQ ID NO. 1190 as residues: Pro-14 to |
| | Ser-21. |
| HNJBF13R | Preferred epitopes include those comprising a sequence |
| | shown in SEQ ID NO. 1191 as residues: Asp-18 to |
| | Asp-28. |
| HLYCD69R | Preferred epitopes include those comprising a sequence |
| | shown in SEQ ID NO. 1192 as residues: Gly-90 to |
| | Thr-109. |
| HWCAA53R | Preferred epitopes include those comprising a sequence |
| | shown in SEQ ID NO. 1194 as residues: Ser-22 to |
| | Gly-28, Glu-37 to Ile-45, Val-67 to Arg-85, |
| | Asn-91 to Trp-99. |
| HFVGP1LR | Preferred epitopes include those comprising a sequence |
| | shown in SEQ ID NO. 1198 as residues: Ala-4 to |
| | Asn-13. |
| HLQH07R | Preferred epitopes include those comprising a sequence |
| | shown in SEQ ID NO. 1199 as residues: Lys-1 to |
| | Lys-25. |
| HWLKH07R | Preferred epitopes include those comprising a sequence |
| | shown in SEQ ID NO. 1201 as residues: Pro-49 to |
| | Asp-58. |
| HAPQC14R | Preferred epitopes include those comprising a sequence |
| | shown in SEQ ID NO. 1202 as residues: Lys-1 to |
| | Met-8. |
| HSODB48R | Preferred epitopes include those comprising a sequence |
| | shown in SEQ ID NO. 1203 as residues: Ser-24 to |
| | Gly-31, Ala-37 to Ser-44, Pro-57 to Ser-64, |
| | Pro-97 to Gly-104. |
| HBEAC75R | Preferred epitopes include those comprising a sequence |
| | shown in SEQ ID NO. 1204 as residues: Pro-1 to |
| | Arg-9. |
| HBGMJ24R | Preferred epitopes include those comprising a sequence |
| | shown in SEQ ID NO. 1205 as residues: Tyr-11 to |
| | Val-17, Thr-30 to Phe-48, Gin-iSO to Thr-155. |
| HBJEN94R | Preferred epitopes include those comprising a sequence |
| | shown in SEQ ID NO. 1206 as residues: Gln-1 to |
| | Asn-6. |
| HLQGB87R | Preferred epitopes include those comprising a sequence |
| | shown in SEQ ID NO. 1213 as residues: Lys-2 to |
| | Ser-7. |
| HAOAC69R | Preferred epitopes include those comprising a sequence |
| | shown in SEQ ID NO. 1215 as residues: Ser-2 to |
| | Arg-10. |
| LIWLEQ08R | Preferred epitopes include those comprising a sequence |
| | shown in SEQ ID NO. 1216 as residues: Glu-21 to |
| | His-31. |
| HKAAV70R | Preferred epitopes include those comprising a sequence |
| | shown in SEQ ID NO. 1217 as residues: Gly-6 to |
| | Thr-93, Glu-95 to Glu-104, Asp-117 to Asp-125. |
| HNFJE41R | Preferred epitopes include those comprising a sequence |
| | shown in SEQ ID NO. 1221 as residues: Arg-15 to |
| | His-21, Pro-48 to Ala-58, Asn-61 to Leu-66, |
| | Val-92 to Thr-110, Pro-114 to Thr-120. |
| HCRMW41R | Preferred epitopes include those comprising a sequence |
| | shown in SEQ ID NO. 1224 as residues: Phe-14 to |
| | Asn-19. |
| HOVAX78R | Preferred epitopes include those comprising a sequence |
| | shown in SEQ ID NO. 1225 as residues: Gly-1 to |
| | Thr-8. |
| HWAEH57R | Preferred epitopes include those comprising a sequence |
| | shown in SEQ ID NO. 1226 as residues: Ser-54 to |
| | Tyr-60, Gln-65 to Pro-72, Thr-81 to Gly-92. |
| HAHEK76R | Preferred epitopes include those comprising a sequence |
| | shown in SEQ ID NO. 1230 as residues: Cys-20 to |
| | Cys-28. |
| HOSCG81R | Preferred epitopes include those comprising a sequence |
| | shown in SEQ ID NO. 1232 as residues: Thr-8 to |
| | Asn-13. |
| HTFMD43R | Preferred epitopes include those comprising a sequence |
| | shown in SEQ ID NO. 1233 as residues: Lys-44 to |
| | Ile-52, Arg-57 to Lys-77. |
| H2LAR73R | Preferred epitopes include those comprising a sequence |
| | shown in SEQ ID NO. 1235 as residues: Pro-20 to |
| | Arg-27, Asn-47 to Lys-53, Asp-116 to Asn-123, |
| | Glu-145 to Gly-154. |
| HWHPK71R | Preferred epitopes include those comprising a sequence |
| | shown in SEQ ID NO. 1238 as residues: Asp-15 to |
| | His-24, Pro-27 to Leu-39. |
| HWBBJ39R | Preferred epitopes include those comprising a sequence |
| | shown in SEQ ID NO. 1239 as residues: His-1 to |
| | Lys-6. |
| HSODD94R | Preferred epitopes include those comprising a sequence |
| | shown in SEQ ID NO. 1241 as residues: Gly-7 to |
| | Glu-15, Gly-29 to Lys-41, Pro-43 to Ser-52, |
| | Pro-68 to His-73. |
| HMIAG25R | Preferred epitopes include those comprising a sequence |
| | shown in SEQ ID NO. 1242 as residues: Arg-19 to |
| | Ser-41, Pro-43 to Glu-54, Ser-59 to Gly-74. |
| HCNDW17R | Preferred epitopes include those comprising a sequence |
| | shown in SEQ ID NO. 1244 as residues: Lys-7 to |
| | Lys-15, Thr-54 to Asn-59. |
| HWLEY08R | Preferred epitopes include those comprising a sequence |
| | shown in SEQ ID NO. 1245 as residues: Glu-9 to |
| | Arg-14, Thr-19 to Arg-27, Asp-48 to Ile-57, |
| | Gln-63 to Leu-75, Cys-89 to Thr-104, |
| | Gly-106 to Pro-113. |
| HULFN68R | Preferred epitopes include those comprising a sequence |
| | shown in SEQ ID NO. 1246 as residues: Ser-1 to |
| | Cys-16, Lys-18 to Gly-23, Pro-31 to Tyr-37, |
| | Gly-53 to Pro-58. |
| HTEJJ32R | Preferred epitopes include those comprising a sequence |
| | shown in SEQ ID NO. 1249 as residues: Ser-17 to |
| | Cys-23, Gln-42 to Leu-51, Ser-68 to Asp-73. |
| H2CBS58R | Preferred epitopes include those comprising a sequence |
| | shown in SEQ ID NO. 1251 as residues: Ser-82 to |
| | Phe-88, Lys-110 to Gly-118. |
| H2LAB77R | Preferred epitopes include those comprising a sequence |
| | shown in SEQ ID NO. 1252 as residues: Met-13 to |
| | Asp-18, Glu-23 to Ser-43, Glu-45 to Gly-54. |
| HWAFP88R | Preferred epitopes include those comprising a sequence |
| | shown in SEQ ID NO. 1254 as residues: Arg-8 to |
| | Lys-13, Gly-35 to Lys-42, Ala-48 to Lys-54. |
| HWMEB67R | Preferred epitopes include those comprising a sequence |
| | shown in SEQ ID NO. 1256 as residues: Arg-9 to |
| | Arg-16. |
| HKMAA52R | Preferred epitopes include those comprising a sequence |
| | shown in SEQ ID NO. 1261 as residues: Gly-2 to |
| | Lys-10, Asp-36 to Asn-42. |
| H2LAB37R | Preferred epitopes include those comprising a sequence |
| | shown in SEQ ID NO. 1262 as residues: Glu-52 to |
| | Thr-59. |
| H2LAP46R | Preferred epitopes include those comprising a sequence |
| | shown in SEQ ID NO. 1263 as residues: Pro-40 to |
| | Asn-46, Tyr-71 to Arg-79. |
| H6BSE61R | Preferred epitopes include those comprising a sequence |
| | shown in SEQ ID NO. 1264 as residues: Ile-36 to |
| | Asp-41, Ala-54 to Pro-63. |
| HACBS75R | Preferred epitopes include those comprising a sequence |
| | shown in SEQ ID NO. 1269 as residues: Arg-20 to |
| | Ser-27, Arg-45 to Trp-59. |
| HACCA48R | Preferred epitopes include those comprising a sequence |
| | shown in SEQ ID NO. 1270 as residues: Lys-12 to |
| | Lys-26. |
| HACCS19R | Preferred epitopes include those comprising a sequence |
| | shown in SEQ ID NO. 1271 as residues: Gly-1 to |
| | Gly-10. |
| HAGGL96R | Preferred epitopes include those comprising a sequence |
| | shown in SEQ ID NO. 1273 as residues: Ser-74 to |
| | Phe-88. |
| HAGGT37R | Preferred epitopes include those comprising a sequence |
| | shown in SEQ ID NO. 1274 as residues: Phe-17 to |
| | Pro-22. |
| HAHDR66R | Preferred epitopes include those comprising a sequence |
| | shown in SEQ ID NO. 1275 as residues: Gly-11 to |
| | Ala-18. |
| HAJCL80R | Preferred epitopes include those comprising a sequence |
| | shown in SEQ ID NO. 1277 as residues: Asn-22 to |
| | Phe-32. |
| HAQMH45R | Preferred epitopes include those comprising a sequence |
| | shown in SEQ ID NO. 1283 as residues: Pro-2 to |
| | Tyr-13, Leu-21 to Gly-47, Val-49 to Gly-55, |
| | Pro-63 to Glu-78. |
| HBGCA44R | Preferred epitopes include those comprising a sequence |
| | shown in SEQ ID NO. 1290 as residues: Thr-20 to |
| | Trp-25, Lys-32 to Leu-40. |
| HBGFX27R | Preferred epitopes include those comprising a sequence |
| | shown in SEQ ID NO. 1291 as residues: Ser-1 to |
| | Pro-6. |
| HBGMU38R | Preferred epitopes include those comprising a sequence |
| | shown in SEQ ID NO. 1292 as residues: Gln-1 to |
| | Phe-8, Thr-34 to Trp-53, Arg-56 to Gly-63, |
| | Arg-86 to Cys-102. |
| HBJED55R | Preferred epitopes include those comprising a sequence |
| | shown in SEQ ID NO. 1295 as residues: Arg-6 to |
| | Pro-14. |
| HBMTJ51R | Preferred epitopes include those comprising a sequence |
| | shown in SEQ ID NO. 1300 as residues: Cys-8 to |
| | Asp-13. |
| HBWBD78R | Preferred epitopes include those comprising a sequence |
| | shown in SEQ ID NO. 1302 as residues: Pro-51 to |
| | Ala-58. |
| HCDDQ63R | Preferred epitopes include those comprising a sequence |
| | shown in SEQ ID NO. 1307 as residues: Gln-1 to |
| | Lys-10. |
| HCFCD01R | Preferred epitopes include those comprising a sequence |
| | shown in SEQ ID NO. 1310 as residues: Ser-1 to |
| | Thr-6. |
| HCFCR43R | Preferred epitopes include those comprising a sequence |
| | shown in SEQ ID NO. 1311 as residues: Arg-10 to |
| | Thr-20. |
| HCHAO92R | Preferred epitopes include those comprising a sequence |
| | shown in SEQ ID NO. 1313 as residues: Asn-19 to |
| | Arg-25. |
| HCHOH49R | Preferred epitopes include those comprising a sequence |
| | shown in SEQ ID NO. 1314 as residues: Asn-19 to |
| | Asp-30. |
| HCHPG05R | Preferred epitopes include those comprising a sequence |
| | shown in SEQ ID NO. 1315 as residues: Pro-6 to |
| | Ser-1 1. |
| HCIAD24R | Preferred epitopes include those comprising a sequence |
| | shown in SEQ ID NO. 1316 as residues: Lys-1 to |
| | Gly-7. |
| HCNCY51R | Preferred epitopes include those comprising a sequence |
| | shown in SEQ ID NO. 1319 as residues: Lys-10 to |
| | Arg-16. |
| HCNCY63R | Preferred epitopes include those comprising a sequence |
| | shown in SEQ ID NO. 1320 as residues: Gly-1 to |
| | Lys-9. |
| HCNDO71R | Preferred epitopes include those comprising a sequence |
| | shown in SEQ ID NO. 1321 as residues: Lys-33 to |
| | Ile-42, Arg-5 1 to Phe-64. |
| HCQBN22R | Preferred epitopes include those comprising a sequence |
| | shown in SEQ ID NO. 1324 as residues: Lys-1 to |
| | Asn-11. |
| HCQCL27R | Preferred epitopes include those comprising a sequence |
| | shown in SEQ ID NO. 1325 as residues: Gly-7 to |
| | His-27. |
| HCQCL48R | Preferred epitopes include those comprising a sequence |
| | shown in SEQ ID NO. 1326 as residues: Ala-1 to |
| | Thr-13. |
| HCQDJ42R | Preferred epitopes include those comprising a sequence |
| | shown in SEQ ID NO. 1330 as residues: Glu-8 to |
| | Asn-13, Arg-16 to Glu-24. |
| HCRMD77R | Preferred epitopes include those comprising a sequence |
| | shown in SEQ ID NO. 1331 as residues: Asn-4 to |
| | Asn-10. |
| HCROJ68R | Preferred epitopes include those comprising a sequence |
| | shown in SEQ ID NO. 1339 as residues: Ile-2 to |
| | His-8. |
| HCROM30R | Preferred epitopes include those comprising a sequence |
| | shown in SEQ ID NO. 1342 as residues: Glu-1 to |
| | Glu-7, Pro-26 to Leu-32, Gly-37 to Gln-44, |
| | Thr-84 to Thr-92. |
| HCROQ34R | Preferred epitopes include those comprising a sequence |
| | shown in SEQ ID NO. 1343 as residues: Asn-1 to |
| | Asp-11. |
| HCROZ66R | Preferred epitopes include those comprising a sequence |
| | shown in SEQ ID NO. 1345 as residues: Arg-7 to |
| | Lys-13. |
| HCRPC61R | Preferred epitopes include those comprising a sequence |
| | shown in SEQ ID NO. 1346 as residues: Ala-3 to |
| | Gly-8. |
| HCRPG28R | Preferred epitopes include those comprising a sequence |
| | shown in SEQ ID NO. 1347 as residues: Pro-26 to |
| | Ser-32. |
| HCRPN52R | Preferred epitopes include those comprising a sequence |
| | shown in SEQ ID NO. 1349 as residues: Ser-24 to |
| | Lys-30, Lys-54 to Ser-61. |
| HDCAA21R | Preferred epitopes include those comprising a sequence |
| | shown in SEQ ID NO. 1354 as residues: Phe-6 to |
| | Val-12, Ile-15 to Phe-20. |
| HDDAA85R | Preferred epitopes include those comprising a sequence |
| | shown in SEQ ID NO. 1355 as residues: Lys-18 to |
| | Lys-24. |
| HDPGO03R | Preferred epitopes include those comprising a sequence |
| | shown in SEQ ID NO. 1356 as residues: Ala-4 to |
| | Gln-17. |
| HDPLB08R | Preferred epitopes include those comprising a sequence |
| | shown in SEQ ID NO. 1357 as residues: Pro-2 to |
| | Tyr-13, Leu-21 to Ala-36. |
| HDQEX80R | Preferred epitopes include those comprising a sequence |
| | shown in SEQ ID NO. 1359 as residues: Arg-1 to |
| | Arg-6, Phe-27 to Arg-32, Pro-37 to Lys-42, |
| | Arg-47 to Trp-53, Arg-5 to Ser-61. |
| HDRMI91R | Preferred epitopes include those comprising a sequence |
| | shown in SEQ ID NO. 1360 as residues: Thr-1 to |
| | Lys-8. |
| HE6DJ45R | Preferred epitopes include those comprising a sequence |
| | shown in SEQ ID NO. 1364 as residues: Pro-1 to |
| | Asn-8. |
| HE9FH12R | Preferred epitopes include those comprising a sequence |
| | shown in SEQ ID NO. 1366 as residues: Asn-12 to |
| | Ser-20. |
| HEAAL59R | Preferred epitopes include those comprising a sequence |
| | shown in SEQ ID NO. 1370 as residues: Gln-20 to |
| | Asn-25. |
| HEGAR32R | Preferred epitopes include those comprising a sequence |
| | shown in SEQ ID NO. 1371 as residues: Lys-9 to |
| | Ser-19. |
| HEGARS5R | Preferred epitopes include those comprising a sequence |
| | shown in SEQ ID NO. 1372 as residues: Ser-16 to |
| | His-46, Arg-49 to Thr-58. |
| HELFE05R | Preferred epitopes include those comprising a sequence |
| | shown in SEQ ID NO. 1373 as residues: Tyr-8 to |
| | Leu-16. |
| HEMFI88R | Preferred epitopes include those comprising a sequence |
| | shown in SEQ ID NO. 1374 as residues: Pro-6 to |
| Ala-13. | |
| HEMFR18R | Preferred epitopes include those comprising a sequence |
| | shown in SEQ ID NO. 1375 as residues: Ala-1 to |
| | Ala-10, Pro-12 to Gly-17, Ala-22 to Cys-27, |
| | Glu-30 to Arg-35, Pro-3 to Ser-50. |
| HEONL43R | Preferred epitopes include those comprising a sequence |
| | shown in SEQ ID NO. 1376 as residues: Arg-1 to |
| | Val-10. |
| HFADM62R | Preferred epitopes include those comprising a sequence |
| | shown in SEQ ID NO. 1380 as residues: Lys-6 to |
| | Lys-14. |
| HFATE3LR | Preferred epitopes include those comprising a sequence |
| | shown in SEQ ID NO. 1381 as residues: Asp-1 to |
| | Arg-9, Arg-20 to Arg-26, Glu-33 to Gly-40. |
| HFCEL77R | Preferred epitopes include those comprising a sequence |
| | shown in SEQ ID NO. 1383 as residues: Glu-33 to |
| | Ser-48, Ile-54 to Ile-63, Leu-79 to Asp-84. |
| HFTBI57R | Preferred epitopes include those comprising a sequence |
| | shown in SEQ ID NO. 1392 as residues: Pro-18 to |
| | Ser-23. |
| HFXGX46R | Preferred epitopes include those comprising a sequence |
| | shown in SEQ ID NO. 1394 as residues: Pro-11 to |
| | Gln-28. |
| HHBEW72R | Preferred epitopes include those comprising a sequence |
| | shown in SEQ ID NO. 1400 as residues: Pro-20 to |
| | Thr-27. |
| HHERT59R | Preferred epitopes include those comprising a sequence |
| | shown in SEQ ID NO. 1401 as residues: Arg-1 to |
| | Trp-9. |
| HJMAH76R | Preferred epitopes include those comprising a sequence |
| | shown in SEQ ID NO. 1405 as residues: Cys-10 to |
| | Ala-15. |
| HJMAN56R | Preferred epitopes include those comprising a sequence |
| | shown in SEQ ID NO. 1406 as residues: Ala-45 to |
| | Asp-60. |
| HJMAO54R | Preferred epitopes include those comprising a sequence |
| | shown in SEQ ID NO. 1407 as residues: Pro-28 to |
| | Gln-39, Pro-65 to Cys-80. |
| HKLSD93R | Preferred epitopes include those comprising a sequence |
| | shown in SEQ ID NO. 1409 as residues: Gly-11 to |
| | Gly-17. |
| HLMFH16R | Preferred epitopes include those comprising a sequence |
| | shown in SEQ ID NO. 1410 as residues: Gly-1 to |
| | Asp-8. |
| HLQCQ73R | Preferred epitopes include those comprising a sequence |
| | shown in SEQ ID NO. 1412 as residues: Glu-1 to |
| | Gly-6, Arg-8 to Phe-13. |
| HLQEF47R | Preferred epitopes include those comprising a sequence |
| | shown in SEQ ID NO. 1413 as residues: Leu-8 to |
| | Leu-13. |
| HLQFM50R | Preferred epitopes include those comprising a sequence |
| | shown in SEQ ID NO. 1414 as residues: Gly-29 to |
| | Asp-34. |
| HLQGA76R | Preferred epitopes include those comprising a sequence |
| | shown in SEQ ID NO. 1416 as residues: Ser-16 to |
| | Ser-33. |
| HLTEV09R | Preferred epitopes include those comprising a sequence |
| | shown in SEQ ID NO. 1418 as residues: Arg-9 to |
| | Asn-17. |
| HMACF85R | Preferred epitopes include those comprising a sequence |
| | shown in SEQ ID NO. 1421 as residues: Glu-29 to |
| | Lys-34, Leu-113 to Gln-120. |
| HMAIA15R | Preferred epitopes include those comprising a sequence |
| | shown in SEQ ID NO. 1422 as residues: Lys-15 to |
| | Gln-21, Ile-51 to Gly-57, Lys-72 to Gly-83. |
| HMCIS54R | Preferred epitopes include those comprising a sequence |
| | shown in SEQ ID NO. 1424 as residues: Lys-3 to |
| | His-24. |
| HNHMR05R | Preferred epitopes include those comprising a sequence |
| | shown in SEQ ID NO. 1427 as residues: Pro-9 to |
| | Gly-20, Thr-26 to Arg-42, Ala-48 to Ser-54. |
| HNJBB78R | Preferred epitopes include those comprising a sequence |
| | shown in SEQ ID NO. 1428 as residues: Thr-6 to |
| | Lys-13, Leu-48 to Asn-54. |
| HOCND06R | Preferred epitopes include those comprising a sequence |
| | shown in SEQ ID NO. 1433 as residues: Pro-2 to |
| | Tyr-13, Leu-21 to Ala-35. |
| HOCND49R | Preferred epitopes include those comprising a sequence |
| | shown in SEQ ID NO. 1434 as residues: Asn-2 to |
| | Gly-12, Ile-14 to Ala-30. |
| HODFA26R | Preferred epitopes include those comprising a sequence |
| | shown in SEQ ID NO. 1436 as residues: Glu-1 to |
| | His-6, Gly-19 to Asp-29, Leu-44 to Leu-49. |
| HODHL89R | Preferred epitopes include those comprising a sequence |
| | shown in SEQ ID NO. 1437 as residues: Ser-16 to |
| | His-46, Arg-49 to Thr-58. |
| HOEJM67R | Preferred epitopes include those comprising a sequence |
| | shown in SEQ ID NO. 1438 as residues: Ser-19 to |
| | Lys-25, Asp-29 to Glu-55, Ser-102 to Thr-107. |
| HOGBN48R | Preferred epitopes include those comprising a sequence |
| | shown in SEQ ID NO. 1439 as residues: Lys-14 to |
| | Arg-19, Asp-25 to Phe-32. |
| HOUHN53R | Preferred epitopes include those comprising a sequence |
| | shown in SEQ ID NO. 1442 as residues: Glu-1 to |
| | His-6, Gly-19 to Trp-31. |
| HPBEE63R | Preferred epitopes include those comprising a sequence |
| | shown in SEQ ID NO. 1444 as residues: Pro-14 to |
| | Gly-20, His-28 to Arg-35. |
| HPJBE91R | Preferred epitopes include those comprising a sequence |
| | shown in SEQ ID NO. 1446 as residues: Ser-15 to |
| | Asn-20, Ala-22 to Ile-49, Lys-52 to Val-57, |
| | Tyr-71 to Cys-83, Thr-90 to Tyr-95. |
| HSDZG83R | Preferred epitopes include those comprising a sequence |
| | shown in SEQ ID NO. 1454 as residues: Val-17 to |
| | Lys-22. |
| HSICQ60R | Preferred epitopes include those comprising a sequence |
| | shown in SEQ ID NO. 1455 as residues: Val-12 to |
| | Gly-17. |
| HSIFA64R | Preferred epitopes include those comprising a sequence |
| | shown in SEQ ID NO. 1456 as residues: His-17 to |
| | Ile-22, Leu-33 to Pro-40. |
| HSKYE52R | Preferred epitopes include those comprising a sequence |
| | shown in SEQ ID NO. 1458 as residues: Pro-2 to |
| | Ser-7. |
| HSODA95R | Preferred epitopes include those comprising a sequence |
| | shown in SEQ ID NO. 1460 as residues: Ser-14 to |
| | His-44, Arg-47 to Thr-56. |
| HSSGK43R | Preferred epitopes include those comprising a sequence |
| | shown in SEQ ID NO. 1462 as residues: Ser-24 to |
| | Leu-35, Pro-38 to Ser-45. |
| HTXFA64R | Preferred epitopes include those comprising a sequence |
| | shown in SEQ ID NO. 1470 as residues: Thr-1 to |
| | Glu-8. |
| HUSJF91R | Preferred epitopes include those comprising a sequence |
| | shown in SEQ ID NO. 1471 as residues: Gly-1 to |
| | Gly-6. |
| HUSJN48R | Preferred epitopes include those comprising a sequence |
| | shown in SEQ ID NO. 1472 as residues: Ser-16 to |
| | Tyr-24. |
| HUSZN23R | Preferred epitopes include those comprising a sequence |
| | shown in SEQ ID NO. 1474 as residues: Ser-16 to |
| | Lys-24. |
| HUTSD20R | Preferred epitopes include those comprising a sequence |
| | shown in SEQ ID NO. 1475 as residues: Arg-10 to |
| | Asn-20. |
| HWAFI63R | Preferred epitopes include those comprising a sequence |
| | shown in SEQ ID NO. 1477 as residues: Pro-15 to |
| | Gly-24, Pro-26 to Arg-45. |
| HWAGZ89R | Preferred epitopes include those comprising a sequence |
| | shown in SEQ ID NO. 1478 as residues: Ser-47 to |
| | Lys-52. |
| HWHHM83R | Preferred epitopes include those comprising a sequence |
| | shown in SEQ ID NO. 1480 as residues: Leu-1 to |
| | Gly-6. |
| HWLBS90R | Preferred epitopes include those comprising a sequence |
| | shown in SEQ ID NO. 1484 as residues: Lys-37 to |
| | Asn-44. |
| HWLEH13R | Preferred epitopes include those comprising a sequence |
| | shown in SEQ ID NO. 1486 as residues: Gln-22 to |
| | Glu-29. |
| HWLEJ67R | Preferred epitopes include those comprising a sequence |
| | shown in SEQ ID NO. 1487 as residues: Asn-5 to |
| | Trp-13. |
| HWLEM49R | Preferred epitopes include those comprising a sequence |
| | shown in SEQ ID NO. 1488 as residues: Glu-1 to |
| | His-6, Gly-19 to Trp-31. |
| HWLGM2LR | Preferred epitopes include those comprising a sequence |
| | shown in SEQ ID NO. 1492 as residues: Glu-1 to |
| | His-6, Gly-19 to Trp-31. |
| HWLGS46R | Preferred epitopes include those comprising a sequence |
| | shown in SEQ ID NO. 1494 as residues: Glu-17 to |
| | Asn-23, Glu-38 to Gly-49. |
| HWLGU40R | Preferred epitopes include those comprising a sequence |
| | shown in SEQ ID NO. 1495 as residues: His-10 to |
| | Pro-15. |
| HWLGX65R | Preferred epitopes include those comprising a sequence |
| | shown in SEQ ID NO. 1496 as residues: Glu-1 to |
| | Asn-7. |
| HWLHD09R | Preferred epitopes include those comprising a sequence |
| | shown in SEQ ID NO. 1497 as residues: Pro-6 to |
| | Ala-37, Arg-40 to Ser-49. |
| HWLHW89R | Preferred epitopes include those comprising a sequence |
| | shown in SEQ ID NO. 1500 as residues: Asn-1 to |
| | Lys-16, Glu-32 to Ser-41, Leu-57 to Gly-71. |
| HWLJL19R | Preferred epitopes include those comprising a sequence |
| | shown in SEQ ID NO. 1506 as residues: Arg-46 to |
| | Phe-58. |
| HWLKG82R | Preferred epitopes include those comprising a sequence |
| | shown in SEQ ID NO. 1508 as residues: Pro-5 to |
| | Gly-25, Ser-29 to Leu-36, Arg-49 to Phe-55. |
| HWLKM86R | Preferred epitopes include those comprising a sequence |
| | shown in SEQ ID NO. 1512 as residues: Arg-10 to |
| | Lys-23. |
| HWLQS83R | Preferred epitopes include those comprising a sequence |
| | shown in SEQ ID NO. 1515 as residues: Ala-1 to |
| | Arg-6. |
| HWLRP86R | Preferred epitopes include those comprising a sequence |
| | shown in SEQ ID NO. 1518 as residues: Tyr-3 to |
| | Gly-10. |
| HWLRQ49R | Preferred epitopes include those comprising a sequence |
| | shown in SEQ ID NO. 1519 as residues: Pro-19 to |
| | Ser-26, Gln-44 to Lys-52. |
| HWLUF60R | Preferred epitopes include those comprising a sequence |
| | shown in SEQ ID NO. 1520 as residues: Gln-7 to |
| | Lys-31. |
| HWLUR41R | Preferred epitopes include those comprising a sequence |
| | shown in SEQ ID NO. 1522 as residues: Ser-24 to |
| | Trp-30. |
| HWLVD60R | Preferred epitopes include those comprising a sequence |
| | shown in SEQ ID NO. 1523 as residues: Cys-15 to |
| | Lys-51. |
| HWMAN61R | Preferred epitopes include those comprising a sequence |
| | shown in SEQ ID NO. 1525 as residues: Ser-21 to |
| | Asp-26. |
| HWMEH26R | Preferred epitopes include those comprising a sequence |
| | shown in SEQ ID NO. 1528 as residues: Ser-16 to |
| | His-46, Arg-49 to Thr-58. |
| HWMEL50R | Preferred epitopes include those comprising a sequence |
| | shown in SEQ ID NO. 1529 as residues: Pro-24 to |
| | Thr-40, Phe-63 to Arg-69. |
| HWMFB31R | Preferred epitopes include those comprising a sequence |
| | shown in SEQ ID NO. 1530 as residues: Asn-2 to |
| | Lys-10, Cys-16 to Pro-28, Ser-36 to Glu-41. |
| HWMFO93R | Preferred epitopes include those comprising a sequence |
| | shown in SEQ ID NO. 1532 as residues: Ser-8 to |
| | Gln-14. |
| HMAFE48R | Preferred epitopes include those comprising a sequence |
| | shown in SEQ ID NO. 1537 as residues: Glu-9 to |
| | Gly-17. |
| HRODJ88R | Preferred epitopes include those comprising a sequence |
| | shown in SEQ ID NO. 1538 as residues: Gly-6 to |
| | Tyr-14. |
| HWLAR31R | Preferred epitopes include those comprising a sequence |
| | shown in SEQ ID NO. 1539 as residues: Glu-9 to |
| | Gly-17. |
| H2LAU24R | Preferred epitopes include those comprising a sequence |
| | shown in SEQ ID NO. 1541 as residues: Glu-11 to |
| | Gly-19. |
| HATDR94R | Preferred epitopes include those comprising a sequence |
| | shown in SEQ ID NO. 1542 as residues: Glu-14 to |
| | Lys-19, Asn-21 to Gly-27. |
| HWLLI85R | Preferred epitopes include those comprising a sequence |
| | shown in SEQ ID NO. 1543 as residues: Val-19 to |
| | Asn-32. |
| HSYCH41R | Preferred epitopes include those comprising a sequence |
| | shown in SEQ ID NO. 1545 as residues: Thr-71 to |
| | Ile-79. |

[0104] The present invention encompasses polypeptides comprising, or alternatively consisting of, an epitope of the polypeptide sequence shown in SEQ ID NO:Y, or an epitope of the polypeptide sequence encoded by the cDNA in the related cDNA clone contained in a deposited library or encoded by a polynucleotide that hybridizes to the complement of an epitope encoding sequence of SEQ ID NO:X, or an epitope encoding sequence contained in the deposited cDNA clone under stringent hybridization conditions, or alternatively, under lower stringency hybridization conditions, as defined supra. The present invention further encompasses polynucleotide sequences encoding an epitope of a polypeptide sequence of the invention (such as, for example, the sequence disclosed in SEQ ID NO:X), polynucleotide sequences of the complementary strand of a polynucleotide sequence encoding an epitope of the invention, and polynucleotide sequences which hybridize to this complementary strand under stringent hybridization conditions or alternatively, under lower stringency hybridization conditions, as defined supra.

[0105] The term “epitopes,” as used herein, refers to portions of a polypeptide having antigenic or immunogenic activity in an animal, preferably a mammal, and most preferably in a human. In a preferred embodiment, the present invention encompasses a polypeptide comprising an epitope, as well as the polynucleotide encoding this polypeptide. An “immunogenic epitope,” as used herein, is defined as a portion of a protein that elicits an antibody response in an animal, as determined by any method known in the art, for example, by the methods for generating antibodies described infra. (See, for example, Geysen et al., Proc. Natl. Acad. Sci. USA 81:3998- 4002 (1983)). The term “antigenic epitope,” as used herein, is defined as a portion of a protein to which an antibody can immunospecifically bind its antigen as determined by any method well known in the art, for example, by the immunoassays described herein. Immunospecific binding excludes non-specific binding but does not necessarily exclude cross- reactivity with other antigens. Antigenic epitopes need not necessarily be immunogenic.

[0106] Fragments which function as epitopes may be produced by any conventional means. (See, e.g., Houghten, R. A., Proc. Natl. Acad. Sci. USA 82:5131-5135 (1985) further described in U.S. Pat. No. 4,631,211.)

[0107] In the present invention, antigenic epitopes preferably contain a sequence of at least 4, at least 5, at least 6, at least 7, more preferably at least 8, at least 9, at least 10, at least 11, at least 12, at least 13, at least 14, at least 15, at least 20, at least 25, at least 30, at least 40, at least 50, and, most preferably, between about 15 to about 30 amino acids. Preferred polypeptides comprising immunogenic or antigenic epitopes are at least 10, 15, 20, 25, 30, 35, 40, 45, 50, 55, 60, 65, 70, 75, 80, 85, 90, 95, or 100 amino acid residues in length. Additional non-exclusive preferred antigenic epitopes include the antigenic epitopes disclosed herein, as well as portions thereof. Antigenic epitopes are useful, for example, to raise antibodies, including monoclonal antibodies, that specifically bind the epitope. Preferred antigenic epitopes include the antigenic epitopes disclosed herein, as well as any combination of two, three, four, five or more of these antigenic epitopes. Antigenic epitopes can be used as the target molecules in immunoassays. (See, for instance, Wilson et al., Cell 37:767-778 (1984); Sutcliffe et al., Science 219:660-666 (1983)).

[0108] Similarly, immunogenic epitopes can be used, for example, to induce antibodies according to methods well known in the art. (See, for instance, Sutcliffe et al., supra; Wilson et al., supra; Chow et al., Proc. Natl. Acad. Sci. USA 82:910-914; and Bittle et al., J. Gen. Virol. 66:2347-2354 (1985). Preferred immunogenic epitopes include the immunogenic epitopes disclosed herein, as well as any combination of two, three, four, five or more of these immunogenic epitopes. The polypeptides comprising one or more immunogenic epitopes may be presented for eliciting an antibody response together with a carrier protein, such as an albumin, to an animal system (such as rabbit or mouse), or, if the polypeptide is of sufficient length (at least about 25 amino acids), the polypeptide may be presented without a carrier. However, immunogenic epitopes comprising as few as 8 to 10 amino acids have been shown to be sufficient to raise antibodies capable of binding to, at the very least, linear epitopes in a denatured polypeptide (e.g., in Western blotting).

[0109] Epitope-bearing polypeptides of the present invention may be used to induce antibodies according to methods well known in the art including, but not limited to, in vivo immunization, in vitro immunization, and phage display methods. See, e.g., Sutcliffe et al., supra; Wilson et al., supra, and Bittle et al., J. Gen. Virol., 66:2347-2354 (1985). If in vivo immunization is used, animals may be immunized with free peptide; however, anti-peptide antibody titer may be boosted by coupling the peptide to a macromolecular carrier, such as keyhole limpet hemacyanin (KLH) or tetanus toxoid. For instance, peptides containing cysteine residues may be coupled to a carrier using a linker such as maleimidobenzoyl- N-hydroxysuccinimide ester (MBS), while other peptides may be coupled to carriers using a more general linking agent such as glutaraldehyde. Animals such as rabbits, rats and mice are immunized with either free or carrier- coupled peptides, for instance, by intraperitoneal and/or intradermal injection of emulsions containing about 100 μg of peptide or carrier protein and Freund's adjuvant or any other adjuvant known for stimulating an immune response. Several booster injections may be needed, for instance, at intervals of about two weeks, to provide a useful titer of anti-peptide antibody which can be detected, for example, by ELISA assay using free peptide adsorbed to a solid surface. The titer of anti-peptide antibodies in serum from an immunized animal may be increased by selection of anti-peptide antibodies, for instance, by adsorption to the peptide on a solid support and elution of the selected antibodies according to methods well known in the art.

[0110] As one of skill in the art will appreciate, and as discussed above, the polypeptides of the present invention, and immunogenic and/or antigenic epitope fragments thereof can be fused to other polypeptide sequences. For example, the polypeptides of the present invention may be fused with the constant domain of immunoglobulins (IgA, IgE, IgG, IgM), or portions thereof (CH1, CH2, CH3, or any combination thereof and portions thereof) resulting in chimeric polypeptides. Such fusion proteins may facilitate purification and may increase half-life in vivo. This has been shown for chimeric proteins consisting of the first two domains of the human CD4-polypeptide and various domains of the constant regions of the heavy or light chains of mammalian immunoglobulins. See, e.g., EP 394,827; Traunecker et al., Nature, 331:84-86 (1988). Enhanced delivery of an antigen across the epithelial barrier to the immune system has been demonstrated for antigens (e.g., insulin) conjugated to an FcRn binding partner such as IgG or Fc fragments (see, e.g., PCT Publications WO 96/22024 and WO 99/04813). IgG Fusion proteins that have a disulfide-linked dimeric structure due to the IgG portion desulfide bonds have also been found to be more efficient in binding and neutralizing other molecules than monomeric polypeptides or fragments thereof alone. See, e.g., Fountoulakis et al., J. Biochem., 270:3958-3964 (1995).

[0111] Similarly, EP-A-O 464 533 (Canadian counterpart 2045869) discloses fusion proteins comprising various portions of constant region of immunoglobulin molecules together with another human protein or part thereof. In many cases, the Fc part in a fusion protein is beneficial in therapy and diagnosis, and thus can result in, for example, improved pharmacokinetic properties. (EP-A 0232 262.) Alternatively, deleting the Fc part after the fusion protein has been expressed, detected, and purified, may be desired. For example, the Fc portion may hinder therapy and diagnosis if the fusion protein is used as an antigen for immunizations. In drug discovery, for example, human proteins, such as hIL-5, have been fused with Fc portions for the purpose of high-throughput screening assays to identify antagonists of hIL-5. (See, D. Bennett et al., J. Molecular Recognition 8:52-58 (1995); K. Johanson et al., J. Biol. Chem. 270:9459-9471 (1995).)

[0112] Moreover, the polypeptides of the present invention can be fused to marker sequences, such as a peptide which facilitates purification of the fused polypeptide. In preferred embodiments, the marker amino acid sequence is a hexa-histidine peptide, such as the tag provided in a pQE vector (QIAGEN, Inc., 9259 Eton Avenue, Chatsworth, Calif., 91311), among others, many of which are commercially available. As described in Gentz et al., Proc. Natl. Acad. Sci. USA 86:821-824 (1989), for instance, hexa-histidine provides for convenient purification of the fusion protein. Another peptide tag useful for purification, the “HA” tag, corresponds to an epitope derived from the influenza hemagglutinin protein. (Wilson et al., Cell 37:767 (1984).)

[0113] Thus, any of these above fusions can be engineered using the polynucleotides or the polypeptides of the present invention.

[0114] Nucleic acids encoding the above epitopes can also be recombined with a gene of interest as an epitope tag (e.g., the hemagglutinin (“HA”) tag or flag tag) to aid in detection and purification of the expressed polypeptide. For example, a system described by Janknecht et al. allows for the ready purification of non-denatured fusion proteins expressed in human cell lines (Janknecht et al., Proc. Natl. Acad. Sci. USA 88:8972- 897 (1991)). In this system, the gene of interest is subcloned into a vaccinia recombination plasmid such that the open reading frame of the gene is translationally fused to an amino-terminal tag consisting of six histidine residues. The tag serves as a matrix binding domain for the fusion protein. Extracts from cells infected with the recombinant vaccinia virus are loaded onto Ni2+ nitriloacetic acid-agarose column and histidine-tagged proteins can be selectively eluted with imidazole-containing buffers.

[0115] Additional fusion proteins of the invention may be generated through the techniques of gene-shuffling, motif-shuffling, exon-shuffling, and/or codon-shuffling (collectively referred to as “DNA shuffling”). DNA shuffling may be employed to modulate the activities of polypeptides of the invention, such methods can be used to generate polypeptides with altered activity, as well as agonists and antagonists of the polypeptides. See, generally, U.S. Pat. Nos. 5,605,793; 5,811,238; 5,830,721; 5,834,252; and 5,837,458, and Patten et al., Curr. Opinion Biotechnol. 8:724-33 (1997); Harayama, Trends Biotechnol. 16(2):76-82 (1998); Hansson, et al., J. Mol. Biol. 287:265-76 (1999); and Lorenzo and Blasco, Biotechniques 24(2):308- 13 (1998) (each of these patents and publications are hereby incorporated by reference in its entirety). In one embodiment, alteration of polynucleotides corresponding to SEQ ID NO:X and the polypeptides encoded by these polynucleotides may be achieved by DNA shuffling. DNA shuffling involves the assembly of two or more DNA segments by homologous or site-specific recombination to generate variation in the polynucleotide sequence. In another embodiment, polynucleotides of the invention, or the encoded polypeptides, may be altered by being subjected to random mutagenesis by error-prone PCR, random nucleotide insertion or other methods prior to recombination. In another embodiment, one or more components, motifs, sections, parts, domains, fragments, etc., of a polynucleotide encoding a polypeptide of the invention may be recombined with one or more components, motifs, sections, parts, domains, fragments, etc. of one or more heterologous molecules.

[0116] As discussed herein, any polypeptide of the present invention can be used to generate fusion proteins. For example, the polypeptide of the present invention, when fused to a second protein, can be used as an antigenic tag. Antibodies raised against the polypeptide of the present invention can be used to indirectly detect the second protein by binding to the polypeptide. Moreover, because secreted proteins target cellular locations based on trafficking signals, polypeptides of the present invention which are shown to be secreted can be used as targeting molecules once fused to other proteins.

[0117] Examples of domains that can be fused to polypeptides of the present invention include not only heterologous signal sequences, but also other heterologous functional regions. The fusion does not necessarily need to be direct, but may occur through linker sequences.

[0118] In certain preferred embodiments, proteins of the invention comprise fusion proteins wherein the polypeptides are N and/or C- terminal deletion mutants. In preferred embodiments, the application is directed to nucleic acid molecules at least 80%, 85%, 90%, 95%, 96%, 97%, 98% or 99% identical to the nucleic acid sequences encoding polypeptides having the amino acid sequence of the specific N- and C-terminal deletions mutants. Polynucleotides encoding these polypeptides are also encompassed by the invention.

[0119] Moreover, fusion proteins may also be engineered to improve characteristics of the polypeptide of the present invention. For instance, a region of additional amino acids, particularly charged amino acids, may be added to the N-terminus of the polypeptide to improve stability and persistence during purification from the host cell or subsequent handling and storage. Also, peptide moieties may be added to the polypeptide to facilitate purification. Such regions may be removed prior to final preparation of the polypeptide. The addition of peptide moieties to facilitate handling of polypeptides are familiar and routine techniques in the art.

[0120] Vectors, Host Cells, and Protein Production

[0121] The present invention also relates to vectors containing the polynucleotide of the present invention, host cells, and the production of polypeptides by recombinant techniques. The vector may be, for example, a phage, plasmid, viral, or retroviral vector. Retroviral vectors may be replication competent or replication defective. In the latter case, viral propagation generally will occur only in complementing host cells.

[0122] The polynucleotides of the invention may be joined to a vector containing a selectable marker for propagation in a host. Generally, a plasmid vector is introduced in a precipitate, such as a calcium phosphate precipitate, or in a complex with a charged lipid. If the vector is a virus, it may be packaged in vitro using an appropriate packaging cell line and then transduced into host cells.

[0123] The polynucleotide insert should be operatively linked to an appropriate promoter, such as the phage lambda PL promoter, the E. coli lac, trp, phoA and tac promoters, the SV40 early and late promoters and promoters of retroviral LTRs, to name a few. Other suitable promoters will be known to the skilled artisan. The expression constructs will further contain sites for transcription initiation, termination, and, in the transcribed region, a ribosome binding site for translation. The coding portion of the transcripts expressed by the constructs will preferably include a translation initiating codon at the beginning and a termination codon (UAA, UGA or UAG) appropriately positioned at the end of the polypeptide to be translated.

[0124] As indicated, the expression vectors will preferably include at least one selectable marker. Such markers include dihydrofolate reductase, G418 or neomycin resistance for eukaryotic cell culture and tetracycline, kanamycin or ampicillin resistance genes for culturing in E. coli and other bacteria. Representative examples of appropriate hosts include, but are not limited to, bacterial cells, such as E. coli, Streptomyces and Salmonella typhimurium cells; fungal cells, such as yeast cells (e.g., Saccharomyces cerevisiae or Pichia pastoris (ATCC Accession No. 201178)); insect cells such as Drosophila S2 and Spodoptera Sf9 cells; animal cells such as CHO, COS, 293, and Bowes melanoma cells; and plant cells. Appropriate culture mediums and conditions for the above-described host cells are known in the art.

[0125] Among vectors preferred for use in bacteria include pQE70, pQE60 and pQE-9, available from QIAGEN, Inc.; pBluescript vectors, Phagescript vectors, pNH8A, pNH16a, pNH18A, pNH46A, available from Stratagene Cloning Systems, Inc.; and ptrc99a, pKK223-3, pKK233-3, pDR540, pRIT5 available from Pharmacia Biotech, Inc. Among preferred eukaryotic vectors are pWLNEO, pSV2CAT, pOG44, pXT1 and pSG available from Stratagene; and pSVK3, pBPV, pMSG and pSVL available from Pharmacia. Preferred expression vectors for use in yeast systems include, but are not limited to pYES2, pYD1, pTEF1/Zeo, pYES2/GS, pPICZ, pGAPZ, pGAPZalph, pPIC9, pPIC3.5, pHIL-D2, pHIL-SI, pPIC3.5K, pPIC9K, and PA0815 (all available from Invitrogen, Carlbad, Calif.). Other suitable vectors will be readily apparent to the skilled artisan.

[0126] Introduction of the construct into the host cell can be effected by calcium phosphate transfection, DEAE-dextran mediated transfection, cationic lipid-mediated transfection, electroporation, transduction, infection, or other methods. Such methods are described in many standard laboratory manuals, such as Davis et al., Basic Methods In Molecular Biology (1986). It is specifically contemplated that the polypeptides of the present invention may in fact be expressed by a host cell lacking a recombinant vector.

[0127] A polypeptide of this invention can be recovered and purified from recombinant cell cultures by well-known methods including ammonium sulfate or ethanol precipitation, acid extraction, anion or cation exchange chromatography, phosphocellulose chromatography, hydrophobic interaction chromatography, affinity chromatography, hydroxylapatite chromatography and lectin chromatography. Most preferably, high performance liquid chromatography (“HPLC”) is employed for purification.

[0128] Polypeptides of the present invention can also be recovered from: products purified from natural sources, including bodily fluids, tissues and cells, whether directly isolated or cultured; products of chemical synthetic procedures; and products produced by recombinant techniques from a prokaryotic or eukaryotic host, including, for example, bacterial, yeast, higher plant, insect, and mammalian cells. Depending upon the host employed in a recombinant production procedure, the polypeptides of the present invention may be glycosylated or may be non-glycosylated. In addition, polypeptides of the invention may also include an initial modified methionine residue, in some cases as a result of host-mediated processes. Thus, it is well known in the art that the N-terminal methionine encoded by the translation initiation codon generally is removed with high efficiency from any protein after translation in all eukaryotic cells. While the N-terminal methionine on most proteins also is efficiently removed in most prokaryotes, for some proteins, this prokaryotic removal process is inefficient, depending on the nature of the amino acid to which the N-terminal methionine is covalently linked.

[0129] In one embodiment, the yeast Pichia pastoris is used to express polypeptides of the invention in a eukaryotic system. Pichia pastoris is a methylotrophic yeast which can metabolize methanol as its sole carbon source. A main step in the methanol metabolization pathway is the oxidation of methanol to formaldehyde using O₂. This reaction is catalyzed by the enzyme alcohol oxidase. In order to metabolize methanol as its sole carbon source, Pichia pastoris must generate high levels of alcohol oxidase due, in part, to the relatively low affinity of alcohol oxidase for O₂. Consequently, in a growth medium depending on methanol as a main carbon source, the promoter region of one of the two alcohol oxidase genes (AOX1) is highly active. In the presence of methanol, alcohol oxidase produced from the AOX1 gene comprises up to approximately 30% of the total soluble protein in Pichia pastoris. See, Ellis, S. B., et al., Mol. Cell. Biol. 5:1111-21 (1985); Koutz, P. J, et al., Yeast 5:167-77 (1989); Tschopp, J. F., et al., Nucl. Acids Res. 15:3859-76 (1987). Thus, a heterologous coding sequence, such as, for example, a polynucleotide of the present invention, under the transcriptional regulation of all or part of the AOX1 regulatory sequence is expressed at exceptionally high levels in Pichia yeast grown in the presence of methanol.

[0130] In one example, the plasmid vector pPIC9K is used to express DNA encoding a polypeptide of the invention, as set forth herein, in a Pichea yeast system essentially as described in “Pichia Protocols: Methods in Molecular Biology,” D. R. Higgins and J. Cregg, eds. The Humana Press, Totowa, N.J., 1998. This expression vector allows expression and secretion of a polypeptide of the invention by virtue of the strong AOX1 promoter linked to the Pichia pastoris alkaline phosphatase (PHO) secretory signal peptide (i.e., leader) located upstream of a multiple cloning site.

[0131] Many other yeast vectors could be used in place of pPIC9K, such as, pYES2, pYD1, pTEF1/Zeo, pYES2/GS, pPICZ, pGAPZ, pGAPZalpha, pPIC9, pPIC3.5, pHIL-D2, pHIL-S1, pPIC3.5K, and PA0815, as one skilled in the art would readily appreciate, as long as the proposed expression construct provides appropriately located signals for transcription, translation, secretion (if desired), and the like, including an in-frame AUG as required.

[0132] In another embodiment, high-level expression of a heterologous coding sequence, such as, for example, a polynucleotide of the present invention, may be achieved by cloning the heterologous polynucleotide of the invention into an expression vector such as, for example, pGAPZ or pGAPZalpha, and growing the yeast culture in the absence of methanol.

[0133] In addition to encompassing host cells containing the vector constructs discussed herein, the invention also encompasses primary, secondary, and immortalized host cells of vertebrate origin, particularly mammalian origin, that have been engineered to delete or replace endogenous genetic material (e.g., coding sequence), and/or to include genetic material (e.g., heterologous polynucleotide sequences) that is operably associated with polynucleotides of the invention, and which activates, alters, and/or amplifies endogenous polynucleotides. For example, techniques known in the art may be used to operably associate heterologous control regions (e.g., promoter and/or enhancer) and endogenous polynucleotide sequences via homologous recombination (see, e.g., U.S. Pat. No. 5,641,670, issued Jun. 24, 1997; International Publication No. WO 96/29411, published Sep. 26, 1996; International Publication No. WO 94/12650, published Aug. 4, 1994; Koller et al., Proc. Natl. Acad. Sci. USA 86:8932-8935 (1989); and Zijlstra et al., Nature 342:435-438 (1989), the disclosures of each of which are incorporated by reference in their entireties).

[0134] In addition, polypeptides of the invention can be chemically synthesized using techniques known in the art (e.g., see Creighton, 1983, Proteins: Structures and Molecular Principles, W.H. Freeman & Co., N.Y., and Hunkapiller et al., Nature, 310:105-111 (1984)). For example, a polypeptide corresponding to a fragment of a polypeptide can be synthesized by use of a peptide synthesizer. Furthermore, if desired, nonclassical amino acids or chemical amino acid analogs can be introduced as a substitution or addition into the polypeptide sequence. Non-classical amino acids include, but are not limited to, to the D-isomers of the common amino acids, 2,4-diaminobutyric acid, a-amino isobutyric acid, 4-aminobutyric acid, Abu, 2-amino butyric acid, g-Abu, e-Ahx, 6-amino hexanoic acid, Aib, 2-amino isobutyric acid, 3-amino propionic acid, ornithine, norleucine, norvaline, hydroxyproline, sarcosine, citrulline, homocitrulline, cysteic acid, t-butylglycine, t-butylalanine, phenylglycine, cyclohexylalanine, b-alanine, fluoro-amino acids, designer amino acids such as b-methyl amino acids, Ca-methyl amino acids, Na-methyl amino acids, and amino acid analogs in general. Furthermore, the amino acid can be D (dextrorotary) or L (levorotary).

[0135] Non-naturally occurring variants may be produced using art-known mutagenesis techniques, which include, but are not limited to oligonucleotide mediated mutagenesis, alanine scanning, PCR mutagenesis, site directed mutagenesis (see, e.g., Carter et al., Nucl. Acids Res. 13:4331 (1986); and Zoller et al., Nucl. Acids Res. 10:6487 (1982)), cassette mutagenesis (see, e.g., Wells et al., Gene 34:315 (1985)), restriction selection mutagenesis (see, e.g., Wells et al., Philos. Trans. R. Soc. London SerA 317:415 (1986)).

[0136] The invention additionally, encompasses polypeptides of the present invention which are differentially modified during or after translation, e.g., by glycosylation, acetylation, phosphorylation, amidation, derivatization by known protecting/blocking groups, proteolytic cleavage, linkage to an antibody molecule or other cellular ligand, etc. Any of numerous chemical modifications may be carried out by known techniques, including but not limited, to specific chemical cleavage by cyanogen bromide, trypsin, chymotrypsin, papain, V8 protease, NaBH₄; acetylation, formylation, oxidation, reduction; metabolic synthesis in the presence of tunicamycin; etc.

[0137] Additional post-translational modifications encompassed by the invention include, for example, e.g., N-linked or 0-linked carbohydrate chains, processing of N-terminal or C-terminal ends), attachment of chemical moieties to the amino acid backbone, chemical modifications of N-linked or 0-linked carbohydrate chains, and addition or deletion of an N-terminal methionine residue as a result of procaryotic host cell expression. The polypeptides may also be modified with a detectable label, such as an enzymatic, fluorescent, isotopic or affinity label to allow for detection and isolation of the protein.

[0138] Also provided by the invention are chemically modified derivatives of the polypeptides of the invention which may provide additional advantages such as increased solubility, stability and circulating time of the polypeptide, or decreased immunogenicity (see U.S. Pat. No. 4,179,337). The chemical moieties for derivitization may be selected from water soluble polymers such as polyethylene glycol, ethylene glycol/propylene glycol copolymers, carboxymethylcellulose, dextran, polyvinyl alcohol and the like. The polypeptides may be modified at random positions within the molecule, or at predetermined positions within the molecule and may include one, two, three or more attached chemical moieties.

[0139] The polymer may be of any molecular weight, and may be branched or unbranched. For polyethylene glycol, the preferred molecular weight is between about 1 kDa and about 100 kDa (the term “about” indicating that in preparations of polyethylene glycol, some molecules will weigh more, some less, than the stated molecular weight) for ease in handling and manufacturing. Other sizes may be used, depending on the desired therapeutic profile (e.g., the duration of sustained release desired, the effects, if any on biological activity, the ease in handling, the degree or lack of antigenicity and other known effects of the polyethylene glycol to a therapeutic protein or analog). For example, the polyethylene glycol may have an average molecular weight of about 200; 500; 1000; 1500; 2000; 2500; 3000; 3500; 4000; 4500; 5000; 5500; 6000; 6500; 7000; 7500; 8000; 8500; 9000; 9500; 10,000; 10,500; 11,000; 11,500; 12,000; 12,500; 13,000; 13,500; 14,000; 14,500; 15,000; 15,500; 16,000; 16,500; 17,000; 17,500; 18,000; 18,500; 19,000; 19,500; 20,000; 25,000; 30,000; 35,000; 40,000; 50,000; 55,000; 60,000; 65,000; 70,000; 75,000; 80,000; 85,000; 90,000; 95,000; or 100,000 kDa.

[0140] As noted above, the polyethylene glycol may have a branched structure. Branched polyethylene glycols are described, for example, in U.S. Pat. No. 5,643,575; Morpurgo et al., Appl. Biochem. Biotechnol. 56:59-72 (1996); Vorobjev et al., Nucleosides Nucleotides 18:2745-2750 (1999); and Caliceti et al., Bioconjug. Chem. 10:638-646 (1999), the disclosures of each of which are incorporated herein by reference.

[0141] The polyethylene glycol molecules (or other chemical moieties) should be attached to the protein with consideration of effects on functional or antigenic domains of the protein. There are a number of attachment methods available to those skilled in the art, e.g., EP 0 401 384, herein incorporated by reference (coupling PEG to G-CSF), see also Malik et al., Exp. Hematol. 20:1028-1035 (1992) (reporting pegylation of GM-CSF using tresyl chloride). For example, polyethylene glycol may be covalently bound through amino acid residues via a reactive group, such as, a free amino or carboxyl group. Reactive groups are those to which an activated polyethylene glycol molecule may be bound. The amino acid residues having a free amino group may include lysine residues and the N-terminal amino acid residues; those having a free carboxyl group may include aspartic acid residues glutamic acid residues and the C-terminal amino acid residue. Sulfhydryl groups may also be used as a reactive group for attaching the polyethylene glycol molecules. Preferred for therapeutic purposes is attachment at an amino group, such as attachment at the N-terminus or lysine group.

[0142] As suggested above, polyethylene glycol may be attached to proteins via linkage to any of a number of amino acid residues. For example, polyethylene glycol can be linked to a proteins via covalent bonds to lysine, histidine, aspartic acid, glutamic acid, or cysteine residues. One or more reaction chemistries may be employed to attach polyethylene glycol to specific amino acid residues (e.g., lysine, histidine, aspartic acid, glutamic acid, or cysteine) of the protein or to more than one type of amino acid residue (e.g., lysine, histidine, aspartic acid, glutamic acid, cysteine and combinations thereof) of the protein.

[0143] One may specifically desire proteins chemically modified at the N-terminus. Using polyethylene glycol as an illustration of the present composition, one may select from a variety of polyethylene glycol molecules (by molecular weight, branching, etc.), the proportion of polyethylene glycol molecules to protein (polypeptide) molecules in the reaction mix, the type of pegylation reaction to be performed, and the method of obtaining the selected N-terminally pegylated protein. The method of obtaining the N-terminally pegylated preparation (i.e., separating this moiety from other monopegylated moieties if necessary) may be by purification of the N-terminally pegylated material from a population of pegylated protein molecules. Selective proteins chemically modified at the N-terminus modification may be accomplished by reductive alkylation which exploits differential reactivity of different types of primary amino groups (lysine versus the N-terminal) available for derivatization in a particular protein. Under the appropriate reaction conditions, substantially selective derivatization of the protein at the N-terminus with a carbonyl group containing polymer is achieved.

[0144] As indicated above, pegylation of the proteins of the invention may be accomplished by any number of means. For example, polyethylene glycol may be attached to the protein either directly or by an intervening linker. Linkerless systems for attaching polyethylene glycol to proteins are described in Delgado et al., Crit. Rev. Thera. Drug Carrier Sys. 9:249-304 (1992); Francis et al., Intern. J. of Hematol. 68:1-18 (1998); U.S. Pat. No. 4,002,531; U.S. Pat. No. 5,349,052; WO 95/06058; and WO 98/32466, the disclosures of each of which are incorporated herein by reference.

[0145] One system for attaching polyethylene glycol directly to amino acid residues of proteins without an intervening linker employs tresylated MPEG, which is produced by the modification of monmethoxy polyethylene glycol (MPEG) using tresylchloride (ClSO₂CH₂CF₃). Upon reaction of protein with tresylated MPEG, polyethylene glycol is directly attached to amine groups of the protein. Thus, the invention includes protein-polyethylene glycol conjugates produced by reacting proteins of the invention with a polyethylene glycol molecule having a 2,2,2-trifluoreothane sulphonyl group.

[0146] Polyethylene glycol can also be attached to proteins using a number of different intervening linkers. For example, U.S. Pat. No. 5,612,460, the entire disclosure of which is incorporated herein by reference, discloses urethane linkers for connecting polyethylene glycol to proteins. Protein-polyethylene glycol conjugates wherein the polyethylene glycol is attached to the protein by a linker can also be produced by reaction of proteins with compounds such as MPEG-succinimidylsuccinate, MPEG activated with 1,1′-carbonyldiimidazole, MPEG-2,4,5-trichloropenylcarbonate, MPEG-p-nitrophenolcarbonate, and various MPEG-succinate derivatives. A number additional polyethylene glycol derivatives and reaction chemistries for attaching polyethylene glycol to proteins are described in WO 98/32466, the entire disclosure of which is incorporated herein by reference. Pegylated protein products produced using the reaction chemistries set out herein are included within the scope of the invention.

[0147] The number of polyethylene glycol moieties attached to each protein of the invention (i.e., the degree of substitution) may also vary. For example, the pegylated proteins of the invention may be linked, on average, to 1, 2, 3, 4, 5, 6, 7, 8, 9, 10, 12, 15, 17, 20, or more polyethylene glycol molecules. Similarly, the average degree of substitution within ranges such as 1-3, 2-4, 3-5, 4-6, 5-7, 6-8, 7-9, 8-10, 9-11, 10-12, 11-13, 12-14, 13-15, 14-16, 15-17, 16-18, 17-19, or 18-20 polyethylene glycol moieties per protein molecule. Methods for determining the degree of substitution are discussed, for example, in Delgado et al., Crit. Rev. Thera. Drug Carrier Sys. 9:249-304 (1992).

[0148] The colorectal cancer antigen polypeptides of the invention may be in monomers or multimers (i.e., dimers, trimers, tetramers and higher multimers). Accordingly, the present invention relates to monomers and multimers of the polypeptides of the invention, their preparation, and compositions (preferably, Therapeutics) containing them. In specific embodiments, the polypeptides of the invention are monomers, dimers, trimers or tetramers. In additional embodiments, the multimers of the invention are at least dimers, at least trimers, or at least tetramers.

[0149] Multimers encompassed by the invention may be homomers or heteromers. As used herein, the term homomer, refers to a multimer containing only polypeptides corresponding to the amino acid sequence of SEQ ID NO:Y or an amino acid sequence encoded by SEQ ID NO:X, and/or an amino acid sequence encoded by the cDNA in a related cDNA clone contained in a deposited library (including fragments, variants, splice variants, and fusion proteins, corresponding to any one of these as described herein). These homomers may contain polypeptides having identical or different amino acid sequences. In a specific embodiment, a homomer of the invention is a multimer containing only polypeptides having an identical amino acid sequence. In another specific embodiment, a homomer of the invention is a multimer containing polypeptides having different amino acid sequences. In specific embodiments, the multimer of the invention is a homodimer (e.g., containing polypeptides having identical or different amino acid sequences) or a homotrimer (e.g., containing polypeptides having identical and/or different amino acid sequences). In additional embodiments, the homomeric multimer of the invention is at least a homodimer, at least a homotrimer, or at least a homotetramer.

[0150] As used herein, the term heteromer refers to a multimer containing one or more heterologous polypeptides (i.e., polypeptides of different proteins) in addition to the polypeptides of the invention. In a specific embodiment, the multimer of the invention is a heterodimer, a heterotrimer, or a heterotetramer. In additional embodiments, the heteromeric multimer of the invention is at least a heterodimer, at least a heterotrimer, or at least a heterotetramer.

[0151] Multimers of the invention may be the result of hydrophobic, hydrophilic, ionic and/or covalent associations and/or may be indirectly linked, by for example, liposome formation. Thus, in one embodiment, multimers of the invention, such as, for example, homodimers or homotrimers, are formed when polypeptides of the invention contact one another in solution. In another embodiment, heteromultimers of the invention, such as, for example, heterotrimers or heterotetramers, are formed when polypeptides of the invention contact antibodies to the polypeptides of the invention (including antibodies to the heterologous polypeptide sequence in a fusion protein of the invention) in solution. In other embodiments, multimers of the invention are formed by covalent associations with and/or between the polypeptides of the invention. Such covalent associations may involve one or more amino acid residues contained in the polypeptide sequence (e.g., that recited in SEQ ID NO:Y, or contained in a polypeptide encoded by SEQ ID NO:X, and/or by the cDNA in the related cDNA clone contained in a deposited library). In one instance, the covalent associations are cross-linking between cysteine residues located within the polypeptide sequences which interact in the native (i.e., naturally occurring) polypeptide. In another instance, the covalent associations are the consequence of chemical or recombinant manipulation. Alternatively, such covalent associations may involve one or more amino acid residues contained in the heterologous polypeptide sequence in a fusion protein. In one example, covalent associations are between the heterologous sequence contained in a fusion protein of the invention (see, e.g., U.S. Pat. No. 5,478,925). In a specific example, the covalent associations are between the heterologous sequence contained in a Fc fusion protein of the invention (as described herein). In another specific example, covalent associations of fusion proteins of the invention are between heterologous polypeptide sequence from another protein that is capable of forming covalently associated multimers, such as for example, oseteoprotegerin (see, e.g., International Publication NO: WO 98/49305, the contents of which are herein incorporated by reference in its entirety). In another embodiment, two or more polypeptides of the invention are joined through peptide linkers. Examples include those peptide linkers described in U.S. Pat. No. 5,073,627 (hereby incorporated by reference). Proteins comprising multiple polypeptides of the invention separated by peptide linkers may be produced using conventional recombinant DNA technology.

[0152] Another method for preparing multimer polypeptides of the invention involves use of polypeptides of the invention fused to a leucine zipper or isoleucine zipper polypeptide sequence. Leucine zipper and isoleucine zipper domains are polypeptides that promote multimerization of the proteins in which they are found. Leucine zippers were originally identified in several DNA-binding proteins (Landschulz et al., Science 240:1759, (1988)), and have since been found in a variety of different proteins. Among the known leucine zippers are naturally occurring peptides and derivatives thereof that dimerize or trimerize. Examples of leucine zipper domains suitable for producing soluble multimeric proteins of the invention are those described in PCT application WO 94/10308, hereby incorporated by reference. Recombinant fusion proteins comprising a polypeptide of the invention fused to a polypeptide sequence that dimerizes or trimerizes in solution are expressed in suitable host cells, and the resulting soluble multimeric fusion protein is recovered from the culture supernatant using techniques known in the art.

[0153] Trimeric polypeptides of the invention may offer the advantage of enhanced biological activity. Preferred leucine zipper moieties and isoleucine moieties are those that preferentially form trimers. One example is a leucine zipper derived from lung surfactant protein D (SPD), as described in Hoppe et al. (FEBS Letters 344:191, (1994)) and in U.S. patent application Ser. No. 08/446,922, hereby incorporated by reference. Other peptides derived from naturally occurring trimeric proteins may be employed in preparing trimeric polypeptides of the invention.

[0154] In another example, proteins of the invention are associated by interactions between Flag® polypeptide sequence contained in fusion proteins of the invention containing Flag® polypeptide seuqence. In a further embodiment, associations proteins of the invention are associated by interactions between heterologous polypeptide sequence contained in Flag® fusion proteins of the invention and anti-Flag® antibody.

[0155] The multimers of the invention may be generated using chemical techniques known in the art. For example, polypeptides desired to be contained in the multimers of the invention may be chemically cross-linked using linker molecules and linker molecule length optimization techniques known in the art (see, e.g., U.S. Pat. No. 5,478,925, which is herein incorporated by reference in its entirety). Additionally, multimers of the invention may be generated using techniques known in the art to form one or more inter-molecule cross-links between the cysteine residues located within the sequence of the polypeptides desired to be contained in the multimer (see, e.g., U.S. Pat. No. 5,478,925, which is herein incorporated by reference in its entirety). Further, polypeptides of the invention may be routinely modified by the addition of cysteine or biotin to the C-terminus or N-terminus of the polypeptide and techniques known in the art may be applied to generate multimers containing one or more of these modified polypeptides (see, e.g., U.S. Pat. No. 5,478,925, which is herein incorporated by reference in its entirety). Additionally, techniques known in the art may be applied to generate liposomes containing the polypeptide components desired to be contained in the multimer of the invention (see, e.g., U.S. Pat. No. 5,478,925, which is herein incorporated by reference in its entirety).

[0156] Alternatively, multimers of the invention may be generated using genetic engineering techniques known in the art. In one embodiment, polypeptides contained in multimers of the invention are produced recombinantly using fusion protein technology described herein or otherwise known in the art (see, e.g., U.S. Pat. No. 5,478,925, which is herein incorporated by reference in its entirety). In a specific embodiment, polynucleotides coding for a homodimer of the invention are generated by ligating a polynucleotide sequence encoding a polypeptide of the invention to a sequence encoding a linker polypeptide and then further to a synthetic polynucleotide encoding the translated product of the polypeptide in the reverse orientation from the original C-terminus to the N-terminus (lacking the leader sequence) (see, e.g., U.S. Pat. No. 5,478,925, which is herein incorporated by reference in its entirety). In another embodiment, recombinant techniques described herein or otherwise known in the art are applied to generate recombinant polypeptides of the invention which contain a transmembrane domain (or hyrophobic or signal peptide) and which can be incorporated by membrane reconstitution techniques into liposomes (see, e.g., U.S. Pat. No. 5,478,925, which is herein incorporated by reference in its entirety).

[0157] Antibodies

[0158] Further polypeptides of the invention relate to antibodies and T-cell antigen receptors (TCR) which immunospecifically bind a polypeptide, polypeptide fragment, or variant of SEQ ID NO:Y, and/or an epitope, of the present invention (as determined by immunoassays well known in the art for assaying specific antibody-antigen binding). Antibodies of the invention include, but are not limited to, polyclonal, monoclonal, multispecific, human, humanized or chimeric antibodies, single chain antibodies, Fab fragments, F(ab') fragments, fragments produced by a Fab expression library, anti-idiotypic (anti-Id) antibodies (including, e.g., anti-Id antibodies to antibodies of the invention), and epitope-binding fragments of any of the above. The term “antibody,” as used herein, refers to immunoglobulin molecules and immunologically active portions of immunoglobulin molecules, i.e., molecules that contain an antigen binding site that immunospecifically binds an antigen. The immunoglobulin molecules of the invention can be of any type (e.g., IgG, IgE, IgM, IgD, IgA and IgY), class (e.g., IgG1, IgG2, IgG3, IgG4, IgA1 and IgA2) or subclass of immunoglobulin molecule.

[0159] Most preferably the antibodies are human antigen-binding antibody fragments of the present invention and include, but are not limited to, Fab, Fab' and F(ab')2, Fd, single-chain Fvs (scFv), single-chain antibodies, disulfide-linked Fvs (sdFv) and fragments comprising either a VL or VH domain. Antigen-binding antibody fragments, including single-chain antibodies, may comprise the variable region(s) alone or in combination with the entirety or a portion of the following: hinge region, CH1, CH2, and CH3 domains. Also included in the invention are antigen-binding fragments also comprising any combination of variable region(s) with a hinge region, CH1, CH2, and CH3 domains. The antibodies of the invention may be from any animal origin including birds and mammals. Preferably, the antibodies are human, murine (e.g., mouse and rat), donkey, ship rabbit, goat, guinea pig, camel, horse, or chicken. As used herein, “human” antibodies include antibodies having the amino acid sequence of a human immunoglobulin and include antibodies isolated from human immunoglobulin libraries or from animals transgenic for one or more human immunoglobulin and that do not express endogenous immunoglobulins, as described infra and, for example in, U.S. Pat. No. 5,939,598 by Kucherlapati et al.

[0160] The antibodies of the present invention may be monospecific, bispecific, trispecific or of greater multispecificity. Multispecific antibodies may be specific for different epitopes of a polypeptide of the present invention or may be specific for both a polypeptide of the present invention as well as for a heterologous epitope, such as a heterologous polypeptide or solid support material. See, e.g., PCT publications WO 93/17715; WO 92/08802; WO 91/00360; WO 92/05793; Tutt, et al., J. Immunol. 147:60-69 (1991); U.S. Pat. Nos. 4,474,893; 4,714,681; 4,925,648; 5,573,920; 5,601,819; Kostelny et al., J. Immunol. 148:1547-1553 (1992).

[0161] Antibodies of the present invention may be described or specified in terms of the epitope(s) or portion(s) of a polypeptide of the present invention which they recognize or specifically bind. The epitope(s) or polypeptide portion(s) may be specified as described herein, e.g., by N-terminal and C-terminal positions, or by size in contiguous amino acid residues. Antibodies which specifically bind any epitope or polypeptide of the present invention may also be excluded. Therefore, the present invention includes antibodies that specifically bind polypeptides of the present invention, and allows for the exclusion of the same.

[0162] Antibodies of the present invention may also be described or specified in terms of their cross-reactivity. Antibodies that do not bind any other analog, ortholog, or homolog of a polypeptide of the present invention are included. Antibodies that bind polypeptides with at least 95%, at least 90%, at least 85%, at least 80%, at least 75%, at least 70%, at least 65%, at least 60%, at least 55%, and at least 50% identity (as calculated using methods known in the art and described herein) to a polypeptide of the present invention are also included in the present invention. In specific embodiments, antibodies of the present invention cross-react with murine, rat and/or rabbit homologs of human proteins and the corresponding epitopes thereof. Antibodies that do not bind polypeptides with less than 95%, less than 90%, less than 85%, less than 80%, less than 75%, less than 70%, less than 65%, less than 60%, less than 55%, and less than 50% identity (as calculated using methods known in the art and described herein) to a polypeptide of the present invention are also included in the present invention. In a specific embodiment, the above-described cross-reactivity is with respect to any single specific antigenic or immunogenic polypeptide, or combination(s) of 2, 3, 4, 5, or more of the specific antigenic and/or immunogenic polypeptides disclosed herein. Further included in the present invention are antibodies which bind polypeptides encoded by polynucleotides which hybridize to a polynucleotide of the present invention under stringent hybridization conditions (as described herein). Antibodies of the present invention may also be described or specified in terms of their binding affinity to a polypeptide of the invention. Preferred binding affinities include those with a dissociation constant or Kd less than 5×10⁻² M, 10⁻² M,5×10⁻³ M, 10⁻³ M,5×10⁻⁴ M, 10⁻⁴ M, 5×10⁻⁵ M, 10⁻⁵ M, 5×10⁻⁶ M, 10⁻⁶M, 5×10⁻⁷ M, 10⁷ M, 5×10⁻⁸ M, 10⁻⁸ M, 5×10⁻⁹M, 10⁻⁹ M, 5×10⁻¹ M, 10⁻¹⁰ M, 5×10⁻¹¹ M, 10⁻¹ M, 5×10⁻² M, 10⁻¹² M, 5×10⁻¹³M, 10⁻¹³ M, 5×10⁻¹⁴M, 5×10⁻¹⁵ M, or 10⁻¹⁵ M.

[0163] The invention also provides antibodies that competitively inhibit binding of an antibody to an epitope of the invention as determined by any method known in the art for determining competitive binding, for example, the immunoassays described herein. In preferred embodiments, the antibody competitively inhibits binding to the epitope by at least 95%, at least 90%, at least 85 %, at least 80%, at least 75%, at least 70%, at least 60%, or at least 50%.

[0164] Antibodies of the present invention may act as agonists or antagonists of the polypeptides of the present invention. For example, the present invention includes antibodies which disrupt the receptor/ligand interactions with the polypeptides of the invention either partially or fully. Preferrably, antibodies of the present invention bind an antigenic epitope disclosed herein, or a portion thereof. The invention features both receptor-specific antibodies and ligand-specific antibodies. The invention also features receptor-specific antibodies which do not prevent ligand binding but prevent receptor activation. Receptor activation (i.e., signaling) may be determined by techniques described herein or otherwise known in the art. For example, receptor activation can be determined by detecting the phosphorylation (e.g., tyrosine or serine/threonine) of the receptor or its substrate by immunoprecipitation followed by western blot analysis (for example, as described supra). In specific embodiments, antibodies are provided that inhibit ligand activity or receptor activity by at least 95%, at least 90%, at least 85%, at least 80%, at least 75%, at least 70%, at least 60%, or at least 50% of the activity in absence of the antibody.

[0165] The invention also features receptor-specific antibodies which both prevent ligand binding and receptor activation as well as antibodies that recognize the receptor-ligand complex, and, preferably, do not specifically recognize the unbound receptor or the unbound ligand. Likewise, included in the invention are neutralizing antibodies which bind the ligand and prevent binding of the ligand to the receptor, as well as antibodies which bind the ligand, thereby preventing receptor activation, but do not prevent the ligand from binding the receptor. Further included in the invention are antibodies which activate the receptor. These antibodies may act as receptor agonists, i.e., potentiate or activate either all or a subset of the biological activities of the ligand-mediated receptor activation, for example, by inducing dimerization of the receptor. The antibodies may be specified as agonists, antagonists or inverse agonists for biological activities comprising the specific biological activities of the peptides of the invention disclosed herein. The above antibody agonists can be made using methods known in the art. See, e.g., PCT publication WO 96/40281; U.S. Pat. No. 5,811,097; Deng et al., Blood 92(6):1981-1988 (1998); Chen et al., Cancer Res. 58(16):3668-3678 (1998); Harrop et al., J. Immunol. 161(4):1786-1794 (1998); Zhu et al., Cancer Res. 58(15):3209-3214 (1998); Yoon et al., J. Immunol. 160(7):3170-3179 (1998); Prat et al., J. Cell. Sci. 111(Pt2):237-247 (1998); Pitard et al., J. Immunol. Methods 205(2):177-190 (1997); Liautard et al., Cytokine 9(4):233-241 (1997); Carlson et al., J. Biol. Chem. 272(17):11295-11301 (1997); Taryman et al., Neuron 14(4):755-762 (1995); Muller et al., Structure 6(9):1153-1167 (1998); Bartunek et al., Cytokine 8(1):14-20 (1996) (which are all incorporated by reference herein in their entireties).

[0166] Antibodies of the present invention may be used, for example, but not limited to, to purify, detect, and target the polypeptides of the present invention, including both in vitro and in vivo diagnostic and therapeutic methods. For example, the antibodies have use in immunoassays for qualitatively and quantitatively measuring levels of the polypeptides of the present invention in biological samples. See, e.g., Harlow et al., Antibodies: A Laboratory Manual, (Cold Spring Harbor Laboratory Press, 2nd ed. 1988) (incorporated by reference herein in its entirety).

[0167] As discussed in more detail below, the antibodies of the present invention may be used either alone or in combination with other compositions. The antibodies may further be recombinantly fused to a heterologous polypeptide at the N- or C-terminus or chemically conjugated (including covalently and non-covalently conjugations) to polypeptides or other compositions. For example, antibodies of the present invention may be recombinantly fused or conjugated to molecules useful as labels in detection assays and effector molecules such as heterologous polypeptides, drugs, radionuclides, or toxins. See, e.g., PCT publications WO 92/08495; WO 91/14438; WO 89/12624; U.S. Pat. No. 5,314,995; and EP 396,387.

[0168] The antibodies of the invention include derivatives that are modified, i.e., by the covalent attachment of any type of molecule to the antibody such that covalent attachment does not prevent the antibody from generating an anti-idiotypic response. For example, but not by way of limitation, the antibody derivatives include antibodies that have been modified, e.g., by glycosylation, acetylation, pegylation, phosphylation, amidation, derivatization by known protecting/blocking groups, proteolytic cleavage, linkage to a cellular ligand or other protein, etc. Any of numerous chemical modifications may be carried out by known techniques, including, but not limited to specific chemical cleavage, acetylation, formylation, metabolic synthesis of tunicamycin, etc. Additionally, the derivative may contain one or more non-classical amino acids.

[0169] The antibodies of the present invention may be generated by any suitable method known in the art. Polyclonal antibodies to an antigen-of- interest can be produced by various procedures well known in the art. For example, a polypeptide of the invention can be administered to various host animals including, but not limited to, rabbits, mice, rats, etc. to induce the production of sera containing polyclonal antibodies specific for the antigen. Various adjuvants may be used to increase the immunological response, depending on the host species, and include but are not limited to, Freund's (complete and incomplete), mineral gels such as aluminum hydroxide, surface active substances such as lysolecithin, pluronic polyols, polyanions, peptides, oil emulsions, keyhole limpet hemocyanins, dinitrophenol, and potentially useful human adjuvants such as BCG (bacille Calmette-Guerin) and corynebacterium parvum. Such adjuvants are also well known in the art.

[0170] Monoclonal antibodies can be prepared using a wide variety of techniques known in the art including the use of hybridoma, recombinant, and phage display technologies, or a combination thereof. For example, monoclonal antibodies can be produced using hybridoma techniques including those known in the art and taught, for example, in Harlow et al., Antibodies: A Laboratory Manual, (Cold Spring Harbor Laboratory Press, 2nd ed. 1988); Hammerling, et al., in: Monoclonal Antibodies and T-Cell Hybridomas 563-681 (Elsevier, N.Y., 1981) (said references incorporated by reference in their entireties). The term “monoclonal antibody” as used herein is not limited to antibodies produced through hybridoma technology. The term “monoclonal antibody” refers to an antibody that is derived from a single clone, including any eukaryotic, prokaryotic, or phage clone, and not the method by which it is produced.

[0171] Methods for producing and screening for specific antibodies using hybridoma technology are routine and well known in the art and are discussed in detail in the Examples. In a non-limiting example, mice can be immunized with a polypeptide of the invention or a cell expressing such peptide. Once an immune response is detected, e.g., antibodies specific for the antigen are detected in the mouse serum, the mouse spleen is harvested and splenocytes isolated. The splenocytes are then fused by well known techniques to any suitable myeloma cells, for example cells from cell line SP20 available from the ATCC. Hybridomas are selected and cloned by limited dilution. The hybridoma clones are then assayed by methods known in the art for cells that secrete antibodies capable of binding a polypeptide of the invention. Ascites fluid, which generally contains high levels of antibodies, can be generated by immunizing mice with positive hybridoma clones.

[0172] Accordingly, the present invention provides methods of generating monoclonal antibodies as well as antibodies produced by the method comprising culturing a hybridoma cell secreting an antibody of the invention wherein, preferably, the hybridoma is generated by fusing splenocytes isolated from a mouse immunized with an antigen of the invention with myeloma cells and then screening the hybridomas resulting from the fusion for hybridoma clones that secrete an antibody able to bind a polypeptide of the invention.

[0173] Antibody fragments which recognize specific epitopes may be generated by known techniques. For example, Fab and F(ab')2 fragments of the invention may be produced by proteolytic cleavage of immunoglobulin molecules, using enzymes such as papain (to produce Fab fragments) or pepsin (to produce F(ab')2 fragments). F(ab')2 fragments contain the variable region, the light chain constant region and the CH1 domain of the heavy chain. For example, the antibodies of the present invention can also be generated using various phage display methods known in the art. In phage display methods, functional antibody domains are displayed on the surface of phage particles which carry the polynucleotide sequences encoding them. In a particular embodiment, such phage can be utilized to display antigen binding domains expressed from a repertoire or combinatorial antibody library (e.g., human or murine). Phage expressing an antigen binding domain that binds the antigen of interest can be selected or identified with antigen, e.g., using labeled antigen or antigen bound or captured to a solid surface or bead. Phage used in these methods are typically filamentous phage including fd and M13 binding domains expressed from phage with Fab, Fv or disulfide stabilized Fv antibody domains recombinantly fused to either the phage gene III or gene VIII protein. Examples of phage display methods that can be used to make the antibodies of the present invention include those disclosed in Brinkman et al., J. Immunol. Methods 182:41-50 (1995); Ames et al., J. Immunol. Methods 184:177-186 (1995); Kettleborough et al., Eur. J. Immunol. 24:952-958 (1994); Persic et al., Gene 187 9-18 (1997); Burton et al., Advances in Immunology 57:191-280 (1994); PCT application No. PCT/GB91/01134; PCT publications WO 90/02809; WO 91/10737; WO 92/01047; WO 92/18619; WO 93111236; WO 95/15982; WO 95/20401; and U.S. Pat. Nos. 5,698,426; 5,223,409; 5,403,484; 5,580,717; 5,427,908; 5,750,753; 5,821,047; 5,571,698; 5,427,908; 5,516,637; 5,780,225; 5,658,727; 5,733,743 and 5,969,108; each of which is incorporated herein by reference in its entirety.

[0174] As described in the above references, after phage selection, the antibody coding regions from the phage can be isolated and used to generate whole antibodies, including human antibodies, or any other desired antigen binding fragment, and expressed in any desired host, including mammalian cells, insect cells, plant cells, yeast, and bacteria, e.g., as described in detail below. For example, techniques to recombinantly produce Fab, Fab′ and F(ab')2 fragments can also be employed using methods known in the art such as those disclosed in PCT publication WO 92/22324; Mullinax et al., BioTechniques 12(6):864-869 (1992); and Sawai et al., AJRI 34:26-34 (1995); and Better et al., Science 240:1041-1043 (1988) (said references incorporated by reference in their entireties).

[0175] Examples of techniques which can be used to produce single-chain Fvs and antibodies include those described in U.S. Pat. Nos. 4,946,778 and 5,258,498; Huston et al., Methods in Enzymology 203:46-88 (1991); Shu et al., PNAS 90:7995-7999 (1993); and Skerra et al., Science 240:1038-1040 (1988). For some uses, including in vivo use of antibodies in humans and in vitro detection assays, it may be preferable to use chimeric, humanized, or human antibodies. A chimeric antibody is a molecule in which different portions of the antibody are derived from different animal species, such as antibodies having a variable region derived from a murine monoclonal antibody and a human immunoglobulin constant region. Methods for producing chimeric antibodies are known in the art. See e.g., Morrison, Science 229:1202 (1985); Oi et al., BioTechniques 4:214 (1986); Gillies et al., (1989) J. Immunol. Methods 125:191-202; U.S. Pat. Nos. 5,807,715; 4,816,567; and 4,816,397, which are incorporated herein by reference in their entirety. Humanized antibodies are antibody molecules from non-human species antibody that binds the desired antigen having one or more complementarity determining regions (CDRs) from the non-human species and a framework regions from a human immunoglobulin molecule. Often, framework residues in the human framework regions will be substituted with the corresponding residue from the CDR donor antibody to alter, preferably improve, antigen binding. These framework substitutions are identified by methods well known in the art, e.g., by modeling of the interactions of the CDR and framework residues to identify framework residues important for antigen binding and sequence comparison to identify unusual framework residues at particular positions. (See, e.g., Queen et al., U.S. Pat. No. 5,585,089; Riechmann et al., Nature 332:323 (1988), which are incorporated herein by reference in their entireties.) Antibodies can be humanized using a variety of techniques known in the art including, for example, CDR-grafting (EP 239,400; PCT publication WO 91/09967; U.S. Pat. Nos. 5,225,539; 5,530,101; and 5,585,089), veneering or resurfacing (EP 592,106; EP 519,596; Padlan, Molecular Immunology 28(4/5):489-498 (1991); Studnicka et al., Protein Engineering 7(6):805-814 (1994); Roguska. et al., PNAS 91:969-973 (1994)), and chain shuffling (U.S. Pat. No. 5,565,332).

[0176] Completely human antibodies are particularly desirable for therapeutic treatment of human patients. Human antibodies can be made by a variety of methods known in the art including phage display methods described above using antibody libraries derived from human immunoglobulin sequences. See also, U.S. Pat. Nos. 4,444,887 and 4,716,111; and PCT publications WO 98/46645, WO 98/50433, WO 98/24893, WO 98/16654, WO 96/34096, WO 96/33735, and WO 91/10741; each of which is incorporated herein by reference in its entirety.

[0177] Human antibodies can also be produced using transgenic mice which are incapable of expressing functional endogenous immunoglobulins, but which can express human immunoglobulin genes. For example, the human heavy and light chain immunoglobulin gene complexes may be introduced randomly or by homologous recombination into mouse embryonic stem cells. Alternatively, the human variable region, constant region, and diversity region may be introduced into mouse embryonic stem cells in addition to the human heavy and light chain genes. The mouse heavy and light chain immunoglobulin genes may be rendered non-functional separately or simultaneously with the introduction of human immunoglobulin loci by homologous recombination. In particular, homozygous deletion of the JH region prevents endogenous antibody production. The modified embryonic stem cells are expanded and microinjected into blastocysts to produce chimeric mice. The chimeric mice are then bred to produce homozygous offspring which express human antibodies. The transgenic mice are immunized in the normal fashion with a selected antigen, e.g., all or a portion of a polypeptide of the invention. Monoclonal antibodies directed against the antigen can be obtained from the immunized, transgenic mice using conventional hybridoma technology. The human immunoglobulin transgenes harbored by the transgenic mice rearrange during B cell differentiation, and subsequently undergo class switching and somatic mutation. Thus, using such a technique, it is possible to produce therapeutically useful IgG, IgA, IgM and IgE antibodies. For an overview of this technology for producing human antibodies, see Lonberg and Huszar, Int. Rev. Immunol. 13:65-93 (1995). For a detailed discussion of this technology for producing human antibodies and human monoclonal antibodies and protocols for producing such antibodies, see, e.g., PCT publications WO 98/24893; WO 92/01047; WO 96/34096; WO 96/33735; European Patent No. 0 598 877; U.S. Pat. Nos. 5,413,923; 5,625,126; 5,633,425; 5,569,825; 5,661,016; 5,545,806; 5,814,318; 5,885,793; 5,916,771; and 5,939,598, which are incorporated by reference herein in their entirety. In addition, companies such as Abgenix, Inc. (Freemont, Calif.) and Genpharm (San Jose, Calif.) can be engaged to provide human antibodies directed against a selected antigen using technology similar to that described above.

[0178] Completely human antibodies which recognize a selected epitope can be generated using a technique referred to as “guided selection.” In this approach a selected non-human monoclonal antibody, e.g., a mouse antibody, is used to guide the selection of a completely human antibody recognizing the same epitope. (Jespers et al., Bio/technology 12:899-903 (1988)).

[0179] Further, antibodies to the polypeptides of the invention can, in turn, be utilized to generate anti-idiotype antibodies that “mimic” polypeptides of the invention using techniques well known to those skilled in the art. (See, e.g., Greenspan & Bona, FASEB J. 7(5):437-444; (1989) and Nissinoff, J. Immunol. 147(8):2429-2438 (1991)). For example, antibodies which bind to and competitively inhibit polypeptide multimerization and/or binding of a polypeptide of the invention to a ligand can be used to generate anti-idiotypes that “mimic” the polypeptide multimerization and/or binding domain and, as a consequence, bind to and neutralize polypeptide and/or its ligand. Such neutralizing anti-idiotypes or Fab fragments of such anti-idiotypes can be used in therapeutic regimens to neutralize polypeptide ligand. For example, such anti-idiotypic antibodies can be used to bind a polypeptide of the invention and/or to bind its ligands/receptors, and thereby block its biological activity.

[0180] Polynucleotides Encoding Antibodies

[0181] The invention further provides polynucleotides comprising a nucleotide sequence encoding an antibody of the invention and fragments thereof. The invention also encompasses polynucleotides that hybridize under stringent or alternatively, under lower stringency hybridization conditions, e.g., as defined supra, to polynucleotides that encode an antibody, preferably, that specifically binds to a polypeptide of the invention, preferably, an antibody that binds to a polypeptide having the amino acid sequence of SEQ ID NO:Y.

[0182] The polynucleotides may be obtained, and the nucleotide sequence of the polynucleotides determined, by any method known in the art. For example, if the nucleotide sequence of the antibody is known, a polynucleotide encoding the antibody may be assembled from chemically synthesized oligonucleotides (e.g., as described in Kutmeier et al., BioTechniques 17:242 (1994)), which, briefly, involves the synthesis of overlapping oligonucleotides containing portions of the sequence encoding the antibody, annealing and ligating of those oligonucleotides, and then amplification of the ligated oligonucleotides by PCR.

[0183] Alternatively, a polynucleotide encoding an antibody may be generated from nucleic acid from a suitable source. If a clone containing a nucleic acid encoding a particular antibody is not available, but the sequence of the antibody molecule is known, a nucleic acid encoding the immunoglobulin may be chemically synthesized or obtained from a suitable source (e.g., an antibody cDNA library, or a cDNA library generated from, or nucleic acid, preferably poly A+ RNA, isolated from, any tissue or cells expressing the antibody, such as hybridoma cells selected to express an antibody of the invention) by PCR amplification using synthetic primers hybridizable to the 3′ and 5′ ends of the sequence or by cloning using an oligonucleotide probe specific for the particular gene sequence to identify, e.g., a cDNA clone from a cDNA library that encodes the antibody. Amplified nucleic acids generated by PCR may then be cloned into replicable cloning vectors using any method well known in the art.

[0184] Once the nucleotide sequence and corresponding amino acid sequence of the antibody is determined, the nucleotide sequence of the antibody may be manipulated using methods well known in the art for the manipulation of nucleotide sequences, e.g., recombinant DNA techniques, site directed mutagenesis, PCR, etc. (see, for example, the techniques described in Sambrook et al., 1990, Molecular Cloning, A Laboratory Manual, 2d Ed., Cold Spring Harbor Laboratory, Cold Spring Harbor, N.Y. and Ausubel et al., eds., 1998, Current Protocols in Molecular Biology, John Wiley & Sons, NY, which are both incorporated by reference herein in their entireties ), to generate antibodies having a different amino acid sequence, for example to create amino acid substitutions, deletions, and/or insertions.

[0185] In a specific embodiment, the amino acid sequence of the heavy and/or light chain variable domains may be inspected to identify the sequences of the complementarity determining regions (CDRs) by methods that are well know in the art, e.g., by comparison to known amino acid sequences of other heavy and light chain variable regions to determine the regions of sequence hypervariability. Using routine recombinant DNA techniques, one or more of the CDRs may be inserted within framework regions, e.g., into human framework regions to humanize a non-human antibody, as described supra. The framework regions may be naturally occurring or consensus framework regions, and preferably human framework regions (see, e.g., Chothia et al., J. Mol. Biol. 278: 457-479 (1998) for a listing of human framework regions). Preferably, the polynucleotide generated by the combination of the framework regions and CDRs encodes an antibody that specifically binds a polypeptide of the invention. Preferably, as discussed supra, one or more amino acid substitutions may be made within the framework regions, and, preferably, the amino acid substitutions improve binding of the antibody to its antigen. Additionally, such methods may be used to make amino acid substitutions or deletions of one or more variable region cysteine residues participating in an intrachain disulfide bond to generate antibody molecules lacking one or more intrachain disulfide bonds. Other alterations to the polynucleotide are encompassed by the present invention and within the skill of the art.

[0186] In addition, techniques developed for the production of “chimeric antibodies” (Morrison et al., Proc. Natl. Acad. Sci. 81:851-855 (1984); Neuberger et al., Nature 312:604-608 (1984); Takeda et al., Nature 314:452-454 (1985)) by splicing genes from a mouse antibody molecule of appropriate antigen specificity together with genes from a human antibody molecule of appropriate biological activity can be used. As described supra, a chimeric antibody is a molecule in which different portions are derived from different animal species, such as those having a variable region derived from a murine mAb and a human immunoglobulin constant region, e.g., humanized antibodies.

[0187] Alternatively, techniques described for the production of single chain antibodies (U.S. Pat. No. 4,946,778; Bird, Science 242:423- 42 (1988); Huston et al., Proc. Natl. Acad. Sci. USA 85:5879-5883 (1988); and Ward et al., Nature 334:544-54 (1989)) can be adapted to produce single chain antibodies. Single chain antibodies are formed by linking the heavy and light chain fragments of the Fv region via an amino acid bridge, resulting in a single chain polypeptide. Techniques for the assembly of functional Fv fragments in E. coli may also be used (Skerra et al., Science 242:1038- 1041 (1988)).

[0188] Methods of Producing Antibodies

[0189] The antibodies of the invention can be produced by any method known in the art for the synthesis of antibodies, in particular, by chemical synthesis or preferably, by recombinant expression techniques.

[0190] Recombinant expression of an antibody of the invention, or fragment, derivative or analog thereof, (e.g., a heavy or light chain of an antibody of the invention or a single chain antibody of the invention), requires construction of an expression vector containing a polynucleotide that encodes the antibody. Once a polynucleotide encoding an antibody molecule or a heavy or light chain of an antibody, or portion thereof (preferably containing the heavy or light chain variable domain), of the invention has been obtained, the vector for the production of the antibody molecule may be produced by recombinant DNA technology using techniques well known in the art. Thus, methods for preparing a protein by expressing a polynucleotide containing an antibody encoding nucleotide sequence are described herein. Methods which are well known to those skilled in the art can be used to construct expression vectors containing antibody coding sequences and appropriate transcriptional and translational control signals. These methods include, for example, in vitro recombinant DNA techniques, synthetic techniques, and in vivo genetic recombination. The invention, thus, provides replicable vectors comprising a nucleotide sequence encoding an antibody molecule of the invention, or a heavy or light chain thereof, or a heavy or light chain variable domain, operably linked to a promoter. Such vectors may include the nucleotide sequence encoding the constant region of the antibody molecule (see, e.g., PCT Publication WO 86/05807; PCT Publication WO 89/01036; and U.S. Pat. No. 5,122,464) and the variable domain of the antibody may be cloned into such a vector for expression of the entire heavy or light chain.

[0191] The expression vector is transferred to a host cell by conventional techniques and the transfected cells are then cultured by conventional techniques to produce an antibody of the invention. Thus, the invention includes host cells containing a polynucleotide encoding an antibody of the invention, or a heavy or light chain thereof, or a single chain antibody of the invention, operably linked to a heterologous promoter. In preferred embodiments for the expression of double-chained antibodies, vectors encoding both the heavy and light chains may be co-expressed in the host cell for expression of the entire immunoglobulin molecule, as detailed below.

[0192] A variety of host-expression vector systems may be utilized to express the antibody molecules of the invention. Such host-expression systems represent vehicles by which the coding sequences of interest may be produced and subsequently purified, but also represent cells which may, when transformed or transfected with the appropriate nucleotide coding sequences, express an antibody molecule of the invention in situ. These include but are not limited to microorganisms such as bacteria (e.g., E. coli, B. subtilis) transformed with recombinant bacteriophage DNA, plasmid DNA or cosmid DNA expression vectors containing antibody coding sequences; yeast (e.g., Saccharomyces, Pichia) transformed with recombinant yeast expression vectors containing antibody coding sequences; insect cell systems infected with recombinant virus expression vectors (e.g., baculovirus) containing antibody coding sequences; plant cell systems infected with recombinant virus expression vectors (e.g., cauliflower mosaic virus, CaMV; tobacco mosaic virus, TMV) or transformed with recombinant plasmid expression vectors (e.g., Ti plasmid) containing antibody coding sequences; or mammalian cell systems (e.g., COS, CHO, BHK, 293, 3T3 cells) harboring recombinant expression constructs containing promoters derived from the genome of mammalian cells (e.g., metallothionein promoter) or from mammalian viruses (e.g., the adenovirus late promoter; the vaccinia virus 7.5K promoter). Preferably, bacterial cells such as Escherichia coli, and more preferably, eukaryotic cells, especially for the expression of whole recombinant antibody molecule, are used for the expression of a recombinant antibody molecule. For example, mammalian cells such as Chinese hamster ovary cells (CHO), in conjunction with a vector such as the major intermediate early gene promoter element from human cytomegalovirus is an effective expression system for antibodies (Foecking et al., Gene 45:101 (1986); Cockett et al., Bio/Technology 8:2 (1990)).

[0193] In bacterial systems, a number of expression vectors may be advantageously selected depending upon the use intended for the antibody molecule being expressed. For example, when a large quantity of such a protein is to be produced, for the generation of pharmaceutical compositions of an antibody molecule, vectors which direct the expression of high levels of fusion protein products that are readily purified may be desirable. Such vectors include, but are not limited, to the E. coli expression vector pUR278 (Ruther et al., EMBO J. 2:1791 (1983)), in which the antibody coding sequence may be ligated individually into the vector in frame with the lac Z coding region so that a fusion protein is produced; pIN vectors (Inouye & Inouye, Nucleic Acids Res. 13:3101-3109 (1985); Van Heeke & Schuster, J. Biol. Chem. 24:5503-5509 (1989)); and the like. pGEX vectors may also be used to express foreign polypeptides as fusion proteins with glutathione S-transferase (GST). In general, such fusion proteins are soluble and can easily be purified from lysed cells by adsorption and binding to matrix glutathione-agarose beads followed by elution in the presence of free glutathione. The pGEX vectors are designed to include thrombin or factor Xa protease cleavage sites so that the cloned target gene product can be released from the GST moiety.

[0194] In an insect system, Autographa californica nuclear polyhedrosis virus (AcNPV) is used as a vector to express foreign genes. The virus grows in Spodoptera frugiperda cells. The antibody coding sequence may be cloned individually into non-essential regions (for example the polyhedrin gene) of the virus and placed under control of an AcNPV promoter (for example the polyhedrin promoter).

[0195] In mammalian host cells, a number of viral-based expression systems may be utilized. In cases where an adenovirus is used as an expression vector, the antibody coding sequence of interest may be ligated to an adenovirus transcription/translation control complex, e.g., the late promoter and tripartite leader sequence. This chimeric gene may then be inserted in the adenovirus genome by in vitro or in vivo recombination. Insertion in a non- essential region of the viral genome (e.g., region El or E3) will result in a recombinant virus that is viable and capable of expressing the antibody molecule in infected hosts. (e.g., see Logan & Shenk, Proc. Natl. Acad. Sci. USA 81:355-359 (1984)). Specific initiation signals may also be required for efficient translation of inserted antibody coding sequences. These signals include the ATG initiation codon and adjacent sequences. Furthermore, the initiation codon must be in phase with the reading frame of the desired coding sequence to ensure translation of the entire insert. These exogenous translational control signals and initiation codons can be of a variety of origins, both natural and synthetic. The efficiency of expression may be enhanced by the inclusion of appropriate transcription enhancer elements, transcription terminators, etc. (see Bittner et al., Methods in Enzymol. 153:51-544 (1987)).

[0196] In addition, a host cell strain may be chosen which modulates the expression of the inserted sequences, or modifies and processes the gene product in the specific fashion desired. Such modifications (e.g., glycosylation) and processing (e.g., cleavage) of protein products may be important for the function of the protein. Different host cells have characteristic and specific mechanisms for the post-translational processing and modification of proteins and gene products. Appropriate cell lines or host systems can be chosen to ensure the correct modification and processing of the foreign protein expressed. To this end, eukaryotic host cells which possess the cellular machinery for proper processing of the primary transcript, glycosylation, and phosphorylation of the gene product may be used. Such mammalian host cells include but are not limited to CHO, VERY, BHK, Hela, COS, MDCK, 293, 3T3, W138, and in particular, breast cancer cell lines such as, for example, BT483, Hs578T, HTB2, BT20 and T47D, and normal mammary gland cell line such as, for example, CRL7030 and Hs578Bst.

[0197] For long-term, high-yield production of recombinant proteins, stable expression is preferred. For example, cell lines which stably express the antibody molecule may be engineered. Rather than using expression vectors which contain viral origins of replication, host cells can be transformed with DNA controlled by appropriate expression control elements (e.g., promoter, enhancer, sequences, transcription terminators, polyadenylation sites, etc.), and a selectable marker. Following the introduction of the foreign DNA, engineered cells may be allowed to grow for 1-2 days in an enriched media, and then are switched to a selective media. The selectable marker in the recombinant plasmid confers resistance to the selection and allows cells to stably integrate the plasmid into their chromosomes and grow to form foci which in turn can be cloned and expanded into cell lines. This method may advantageously be used to engineer cell lines which express the antibody molecule. Such engineered cell lines may be particularly useful in screening and evaluation of compounds that interact directly or indirectly with the antibody molecule.

[0198] A number of selection systems may be used, including but not limited to the herpes simplex virus thymidine kinase (Wigler et al., Cell 11:223 (1977)), hypoxanthine-guanine phosphoribosyltransferase (Szybalska & Szybalski, Proc. Natl. Acad. Sci. USA 48:202 (1992)), and adenine phosphoribosyltransferase (Lowy et al., Cell 22:817 (1980)) genes can be employed in tk-, hgprt- or aprt- cells, respectively. Also, antimetabolite resistance can be used as the basis of selection for the following genes: dhfr, which confers resistance to methotrexate (Wigler et al., Natl. Acad. Sci. USA 77:357 (1980); O'Hare et al., Proc. Natl. Acad. Sci. USA 78:1527 (1981)); gpt, which confers resistance to mycophenolic acid (Mulligan & Berg, Proc. Natl. Acad. Sci. USA 78:2072 (1981)); neo, which confers resistance to the aminoglycoside G-418 Clinical Pharmacy 12:488-505; Wu and Wu, Biotherapy 3:87-95 (1991); Tolstoshev, Ann. Rev. Pharmacol. Toxicol. 32:573-596 (1993); Mulligan, Science 260:926-932 (1993); and Morgan and Anderson, Ann. Rev. Biochem. 62:191-217 (1993); May, 1993, TIB TECH 11(5):155-215); and hygro, which confers resistance to hygromycin (Santerre et al., Gene 30:147 (1984)). Methods commonly known in the art of recombinant DNA technology may be routinely applied to select the desired recombinant clone, and such methods are described, for example, in Ausubel et al. (eds.), Current Protocols in Molecular Biology, John Wiley & Sons, NY (1993); Kriegler, Gene Transfer and Expression, A Laboratory Manual, Stockton Press, NY (1990); and in Chapters 12 and 13, Dracopoli et al. (eds), Current Protocols in Human Genetics, John Wiley & Sons, NY (1994); Colberre-Garapin et al., J. Mol. Biol. 150:1 (1981), which are incorporated by reference herein in their entireties.

[0199] The expression levels of an antibody molecule can be increased by vector amplification (for a review, see Bebbington and Hentschel, The use of vectors based on gene amplification for the expression of cloned genes in mammalian cells in DNA cloning, Vol.3. (Academic Press, New York, 1987)). When a marker in the vector system expressing antibody is amplifiable, increase in the level of inhibitor present in culture of host cell will increase the number of copies of the marker gene. Since the amplified region is associated with the antibody gene, production of the antibody will also increase (Crouse et al., Mol. Cell. Biol. 3:257 (1983)).

[0200] The host cell may be co-transfected with two expression vectors of the invention, the first vector encoding a heavy chain derived polypeptide and the second vector encoding a light chain derived polypeptide. The two vectors may contain identical selectable markers which enable equal expression of heavy and light chain polypeptides. Alternatively, a single vector may be used which encodes, and is capable of expressing, both heavy and light chain polypeptides. In such situations, the light chain should be placed before the heavy chain to avoid an excess of toxic free heavy chain (Proudfoot, Nature 322:52 (1986); Kohler, Proc. Natl. Acad. Sci. USA 77:2197 (1980)). The coding sequences for the heavy and light chains may comprise cDNA or genomic DNA. Once an antibody molecule of the invention has been produced by an animal, chemically synthesized, or recombinantly expressed, it may be purified by any method known in the art for purification of an immunoglobulin molecule, for example, by chromatography (e.g., ion exchange, affinity, particularly by affinity for the specific antigen after Protein A, and sizing column chromatography), centrifugation, differential solubility, or by any other standard technique for the purification of proteins. In addition, the antibodies of the present invention or fragments thereof can be fused to heterologous polypeptide sequences described herein or otherwise known in the art, to facilitate purification.

[0201] The present invention encompasses antibodies recombinantly fused or chemically conjugated (including both covalently and non-covalently conjugations) to a polypeptide (or portion thereof, preferably at least 10, 20, 30, 40, 50, 60, 70, 80, 90 or 100 amino acids of the polypeptide) of the present invention to generate fusion proteins. The fusion does not necessarily need to be direct, but may occur through linker sequences. The antibodies may be specific for antigens other than polypeptides (or portion thereof, preferably at least 10, 20, 30, 40, 50, 60, 70, 80, 90 or 100 amino acids of the polypeptide) of the present invention. For example, antibodies may be used to target the polypeptides of the present invention to particular cell types, either in vitro or in vivo, by fusing or conjugating the polypeptides of the present invention to antibodies specific for particular cell surface receptors. Antibodies fused or conjugated to the polypeptides of the present invention may also be used in in vitro immunoassays and purification methods using methods known in the art. See e.g., Harbor et al., supra, and PCT publication WO 93/21232; EP 439,095; Naramura et al., Immunol. Lett. 39:91-99 (1994); U.S. Pat. 5,474,981; Gillies et al., PNAS 89:1428-1432 (1992); Fell et al., J. Immunol. 146:2446-2452(1991), which are incorporated by reference in their entireties.

[0202] The present invention further includes compositions comprising the polypeptides of the present invention fused or conjugated to antibody domains other than the variable regions. For example, the polypeptides of the present invention may be fused or conjugated to an antibody Fc region, or portion thereof. The antibody portion fused to a polypeptide of the present invention may comprise the constant region, hinge region, CH1 domain, CH2 domain, and CH3 domain or any combination of whole domains or portions thereof. The polypeptides may also be fused or conjugated to the above antibody portions to form multimers. For example, Fc portions fused to the polypeptides of the present invention can form dimers through disulfide bonding between the Fc portions. Higher multimeric forms can be made by fusing the polypeptides to portions of IgA and IgM. Methods for fusing or conjugating the polypeptides of the present invention to antibody portions are known in the art. See, e.g., U.S. Pat. Nos. 5,336,603; 5,622,929; 5,359,046; 5,349,053; 5,447,851; 5,112,946; EP 307,434; EP 367,166; PCT publications WO 96/04388; WO 91/06570; Ashkenazi et al., Proc. Natl. Acad. Sci. USA 88:10535-10539 (1991); Zheng et al., J. Immunol. 154:5590-5600 (1995); and Vil et al., Proc. Natl. Acad. Sci. USA 89:11337- 11341(1992) (said references incorporated by reference in their entireties).

[0203] As discussed, supra, the polypeptides corresponding to a polypeptide, polypeptide fragment, or a variant of SEQ ID NO:Y may be fused or conjugated to the above antibody portions to increase the in vivo half life of the polypeptides or for use in immunoassays using methods known in the art. Further, the polypeptides corresponding to SEQ ID NO:Y may be fused or conjugated to the above antibody portions to facilitate purification. One reported example describes chimeric proteins consisting of the first two domains of the human CD4-polypeptide and various domains of the constant regions of the heavy or light chains of mammalian immunoglobulins. (EP 394,827; Traunecker et al., Nature 331:84-86 (1988). The polypeptides of the present invention fused or conjugated to an antibody having disulfide- linked dimeric structures (due to the IgG) may also be more efficient in binding and neutralizing other molecules, than the monomeric secreted protein or protein fragment alone. (Fountoulakis et al., J. Biochem. 270:3958-3964 (1995)). In many cases, the Fc part in a fusion protein is beneficial in therapy and diagnosis, and thus can result in, for example, improved pharmacokinetic properties. (EP A 232,262). Alternatively, deleting the Fc part after the fusion protein has been expressed, detected, and purified, would be desired. For example, the Fc portion may hinder therapy and diagnosis if the fusion protein is used as an antigen for immunizations. In drug discovery, for example, human proteins, such as hIL-5, have been fused with Fc portions for the purpose of high-throughput screening assays to identify antagonists of hIL-5. (See, Bennett et al., J. Molecular Recognition 8:52-58 (1995); Johanson et al., J. Biol. Chem. 270:9459-9471 (1995).

[0204] Moreover, the antibodies or fragments thereof of the present invention can be fused to marker sequences, such as a peptide to facilitate purification. In preferred embodiments, the marker amino acid sequence is a hexa-histidine peptide, such as the tag provided in a pQE vector (QIAGEN, Inc., 9259 Eton Avenue, Chatsworth, Calif., 91311), among others, many of which are commercially available. As described in Gentz et al., Proc. Natl. Acad. Sci. USA 86:821-824 (1989), for instance, hexa-histidine provides for convenient purification of the fusion protein. Other peptide tags useful for purification include, but are not limited to, the “HA” tag, which corresponds to an epitope derived from the influenza hemagglutinin protein (Wilson et al., Cell 37:767 (1984)) and the “flag” tag.

[0205] The present invention further encompasses antibodies or fragments thereof conjugated to a diagnostic or therapeutic agent. The antibodies can be used diagnostically to, for example, monitor the development or progression of a tumor as part of a clinical testing procedure to, e.g., determine the efficacy of a given treatment regimen. Detection can be facilitated by coupling the antibody to a detectable substance. Examples of detectable substances include various enzymes, prosthetic groups, fluorescent materials, luminescent materials, bioluminescent materials, radioactive materials, positron emitting metals using various positron emission tomographies, and nonradioactive paramagnetic metal ions. The detectable substance may be coupled or conjugated either directly to the antibody (or fragment thereof) or indirectly, through an intermediate (such as, for example, a linker known in the art) using techniques known in the art. See, for example, U.S. Pat. No. 4,741,900 for metal ions which can be conjugated to antibodies for use as diagnostics according to the present invention. Examples of suitable enzymes include horseradish peroxidase, alkaline phosphatase, beta-galactosidase, or acetylcholinesterase; examples of suitable prosthetic group complexes include streptavidin/biotin and avidin/biotin; examples of suitable fluorescent materials include umbelliferone, fluorescein, fluorescein isothiocyanate, rhodamine, dichlorotriazinylamine fluorescein, dansyl chloride or phycoerythrin; an example of a luminescent material includes luminol; examples of bioluminescent materials include luciferase, luciferin, and aequorin; and examples of suitable radioactive material include 125I, 131I, 111n or 99Tc.

[0206] Further, an antibody or fragment thereof may be conjugated to a therapeutic moiety such as a cytotoxin, e.g., a cytostatic or cytocidal agent, a therapeutic agent or a radioactive metal ion, e.g., alpha-emitters such as, for example, 213Bi. A cytotoxin or cytotoxic agent includes any agent that is detrimental to cells. Examples include paclitaxol, cytochalasin B, gramicidin D, ethidium bromide, emetine, mitomycin, etoposide, tenoposide, vincristine, vinblastine, colchicin, doxorubicin, daunorubicin, dihydroxy anthracin dione, mitoxantrone, mithramycin, actinomycin D, 1-dehydrotestosterone, glucocorticoids, procaine, tetracaine, lidocaine, propranolol, and puromycin and analogs or homologs thereof. Therapeutic agents include, but are not limited to, antimetabolites (e.g., methotrexate, 6-mercaptopurine, 6-thioguanine, cytarabine, 5-fluorouracil decarbazine), alkylating agents (e.g., mechlorethamine, thioepa chlorambucil, melphalan, carmustine (BSNU) and lomustine (CCNU), cyclothosphamide, busulfan, dibromomannitol, streptozotocin, mitomycin C, and cis- dichlorodiamine platinum (II) (DDP) cisplatin), anthracyclines (e.g., daunorubicin (formerly daunomycin) and doxorubicin), antibiotics (e.g., dactinomycin (formerly actinomycin), bleomycin, mithramycin, and anthramycin (AMC)), and anti-mitotic agents (e.g., vincristine and vinblastine).

[0207] The conjugates of the invention can be used for modifying a given biological response, the therapeutic agent or drug moiety is not to be construed as limited to classical chemical therapeutic agents. For example, the drug moiety may be a protein or polypeptide possessing a desired biological activity. Such proteins may include, for example, a toxin such as abrin, ricin A, pseudomonas exotoxin, or diphtheria toxin; a protein such as tumor necrosis factor, a-interferon, B-interferon, nerve growth factor, platelet derived growth factor, tissue plasminogen activator, an apoptotic agent, e.g., TNF-alpha, TNF-beta, AIM I (See, International Publication No. WO 97/33899), AIM II (See, International Publication No. WO 97/34911), Fas Ligand (Takahashi et al., Int. Immunol., 6:1567-1574 (1994)), VEGI (See, International Publication No. WO 99/23105), a thrombotic agent or an anti- angiogenic agent, e.g., angiostatin or endostatin; or, biological response modifiers such as, for example, lymphokines, interleukin-1 (“IL-1”), interleukin-2 (“IL-2”), interleukin-6 (“IL-6”), granulocyte macrophage colony stimulating factor (“GM-CSF”), granulocyte colony stimulating factor (“G-CSF”), or other growth factors.

[0208] Antibodies may also be attached to solid supports, which are particularly useful for immunoassays or purification of the target antigen. Such solid supports include, but are not limited to, glass, cellulose, polyacrylamide, nylon, polystyrene, polyvinyl chloride or polypropylene.

[0209] Techniques for conjugating such therapeutic moiety to antibodies are well known, see, e.g., Arnon et al., “Monoclonal Antibodies For Immunotargeting Of Drugs In Cancer Therapy”, in Monoclonal Antibodies And Cancer Therapy, Reisfeld et al. (eds.), pp. 243-56 (Alan R. Liss, Inc. 1985); Hellstrom et al., “Antibodies For Drug Delivery”, in Controlled Drug Delivery (2nd Ed.), Robinson et al. (eds.), pp. 623-53 (Marcel Dekker, Inc. 1987); Thorpe, “Antibody Carriers Of Cytotoxic Agents In Cancer Therapy: A Review”, in Monoclonal Antibodies '84: Biological And Clinical Applications, Pinchera et al. (eds.), pp. 475-506 (1985); “Analysis, Results, And Future Prospective Of The Therapeutic Use Of Radiolabeled Antibody In Cancer Therapy”, in Monoclonal Antibodies For Cancer Detection And Therapy, Baldwin et al. (eds.), pp. 303-16 (Academic Press 1985), and Thorpe et al., “The Preparation And Cytotoxic Properties Of Antibody-Toxin Conjugates”, Immunol. Rev. 62:119-58 (1982).

[0210] Alternatively, an antibody can be conjugated to a second antibody to form an antibody heteroconjugate as described by Segal in U.S. Pat. No. 4,676,980, which is incorporated herein by reference in its entirety.

[0211] An antibody, with or without a therapeutic moiety conjugated to it, administered alone or in combination with cytotoxic factor(s) and/or cytokine(s) can be used as a therapeutic.

[0212] Immunophenotyping

[0213] The antibodies of the invention may be utilized for immunophenotyping of cell lines and biological samples. The translation product of the gene of the present invention may be useful as a cell specific marker, or more specifically as a cellular marker that is differentially expressed at various stages of differentiation and/or maturation of particular cell types. Monoclonal antibodies directed against a specific epitope, or combination of epitopes, will allow for the screening of cellular populations expressing the marker. Various techniques can be utilized using monoclonal antibodies to screen for cellular populations expressing the marker(s), and include magnetic separation using antibody-coated magnetic beads, “panning” with antibody attached to a solid matrix (i.e., plate), and flow cytometry (See, e.g., U.S. Pat. No. 5,985,660; and Morrison et al., Cell, 96:737-49 (1999)).

[0214] These techniques allow for the screening of particular populations of cells, such as might be found with hematological malignancies (i.e. minimal residual disease (MRD) in acute leukemic patients) and “non-self” cells in transplantations to prevent Graft-versus-Host Disease (GVHD). Alternatively, these techniques allow for the screening of hematopoietic stem and progenitor cells capable of undergoing proliferation and/or differentiation, as might be found in human umbilical cord blood.

[0215] Assays For Antibody Binding

[0216] The antibodies of the invention may be assayed for immunospecific binding by any method known in the art. The immunoassays which can be used include but are not limited to competitive and non-competitive assay systems using techniques such as western blots, radioimmunoassays, ELISA (enzyme linked immunosorbent assay), “sandwich” immunoassays, immunoprecipitation assays, precipitin reactions, gel diffusion precipitin reactions, immunodiffusion assays, agglutination assays, complement-fixation assays, immunoradiometric assays, fluorescent immunoassays, protein A immunoassays, to name but a few. Such assays are routine and well known in the art (see, e.g., Ausubel et al, eds, 1994, Current Protocols in Molecular Biology, Vol. 1, John Wiley & Sons, Inc., New York, which is incorporated by reference herein in its entirety). Exemplary immunoassays are described briefly below (but are not intended by way of limitation).

[0217] Immunoprecipitation protocols generally comprise lysing a population of cells in a lysis buffer such as RIPA buffer (1% NP-40 or Triton X-100, 1% sodium deoxycholate, 0.1% SDS, 0.15 M NaCl, 0.01 M sodium phosphate at pH 7.2, 1% Trasylol) supplemented with protein phosphatase and/or protease inhibitors (e.g., EDTA, PMSF, aprotinin, sodium vanadate), adding the antibody of interest to the cell lysate, incubating for a period of time (e.g., 1-4 hours) at 4° C., adding protein A and/or protein G sepharose beads to the cell lysate, incubating for about an hour or more at 4° C, washing the beads in lysis buffer and resuspending the beads in SDS/sample buffer. The ability of the antibody of interest to immunoprecipitate a particular antigen can be assessed by, e.g., western blot analysis. One of skill in the art would be knowledgeable as to the parameters that can be modified to increase the binding of the antibody to an antigen and decrease the background (e.g., pre-clearing the cell lysate with sepharose beads). For further discussion regarding immunoprecipitation protocols see, e.g., Ausubel et al, eds, 1994, Current Protocols in Molecular Biology, Vol. 1, John Wiley & Sons, Inc., New York at 10.16.1.

[0218] Western blot analysis generally comprises preparing protein samples, electrophoresis of the protein samples in a polyacrylamide gel (e.g., 8%- 20% SDS-PAGE depending on the molecular weight of the antigen), transferring the protein sample from the polyacrylamide gel to a membrane such as nitrocellulose, PVDF or nylon, blocking the membrane in blocking solution (e.g., PBS with 3% BSA or non-fat milk), washing the membrane in washing buffer (e.g., PBS-Tween 20), blocking the membrane with primary antibody (the antibody of interest) diluted in blocking buffer, washing the membrane in washing buffer, blocking the membrane with a secondary antibody (which recognizes the primary antibody, e.g., an anti-human antibody) conjugated to an enzymatic substrate (e.g., horseradish peroxidase or alkaline phosphatase) or radioactive molecule (e.g., 32P or 125I) diluted in blocking buffer, washing the membrane in wash buffer, and detecting the presence of the antigen. One of skill in the art would be knowledgeable as to the parameters that can be modified to increase the signal detected and to reduce the background noise. For further discussion regarding western blot protocols see, e.g., Ausubel et al, eds, 1994, Current Protocols in Molecular Biology, Vol. 1, John Wiley & Sons, Inc., New York at 10.8.1.

[0219] ELISAs comprise preparing antigen, coating the well of a 96 well microtiter plate with the antigen, adding the antibody of interest conjugated to a detectable compound such as an enzymatic substrate (e.g., horseradish peroxidase or alkaline phosphatase) to the well and incubating for a period of time, and detecting the presence of the antigen. In ELISAs the antibody of interest does not have to be conjugated to a detectable compound; instead, a second antibody (which recognizes the antibody of interest) conjugated to a detectable compound may be added to the well. Further, instead of coating the well with the antigen, the antibody may be coated to the well. In this case, a second antibody conjugated to a detectable compound may be added following the addition of the antigen of interest to the coated well. One of skill in the art would be knowledgeable as to the parameters that can be modified to increase the signal detected as well as other variations of ELISAs known in the art. For further discussion regarding ELISAs see, e.g., Ausubel et al, eds, 1994, Current Protocols in Molecular Biology, Vol. 1, John Wiley & Sons, Inc., New York at 11.2.1.

[0220] The binding affinity of an antibody to an antigen and the off-rate of an antibody-antigen interaction can be determined by competitive binding assays. One example of a competitive binding assay is a radioimmunoassay comprising the incubation of labeled antigen (e.g., 3H or 125I) with the antibody of interest in the presence of increasing amounts of unlabeled antigen, and the detection of the antibody bound to the labeled antigen. The affinity of the antibody of interest for a particular antigen and the binding off-rates can be determined from the data by scatchard plot analysis. Competition with a second antibody can also be determined using radioimmunoassays. In this case, the antigen is incubated with antibody of interest conjugated to a labeled compound (e.g., 3H or 125I) in the presence of increasing amounts of an unlabeled second antibody.

[0221] Therapeutic Uses

[0222] The present invention is further directed to antibody-based therapies which involve administering antibodies of the invention to an animal, preferably a mammal, and most preferably a human, patient for treating one or more of the disclosed diseases, disorders, or conditions. Therapeutic compounds of the invention include, but are not limited to, antibodies of the invention (including fragments, analogs and derivatives thereof as described herein) and nucleic acids encoding antibodies of the invention (including fragments, analogs and derivatives thereof and anti-idiotypic antibodies as described herein). The antibodies of the invention can be used to treat, inhibit or prevent diseases, disorders or conditions associated with aberrant expression and/or activity of a polypeptide of the invention, including, but not limited to, any one or more of the diseases, disorders, or conditions described herein. The treatment and/or prevention of diseases, disorders, or conditions associated with aberrant expression and/or activity of a polypeptide of the invention includes, but is not limited to, alleviating symptoms associated with those diseases, disorders or conditions. Antibodies of the invention may be provided in pharmaceutically acceptable compositions as known in the art or as described herein.

[0223] A summary of the ways in which the antibodies of the present invention may be used therapeutically includes binding polynucleotides or polypeptides of the present invention locally or systemically in the body or by direct cytotoxicity of the antibody, e.g. as mediated by complement (CDC) or by effector cells (ADCC). Some of these approaches are described in more detail below. Armed with the teachings provided herein, one of ordinary skill in the art will know how to use the antibodies of the present invention for diagnostic, monitoring or therapeutic purposes without undue experimentation.

[0224] The antibodies of this invention may be advantageously utilized in combination with other monoclonal or chimeric antibodies, or with lymphokines or hematopoietic growth factors (such as, e.g., IL-2, IL-3 and IL-7), for example, which serve to increase the number or activity of effector cells which interact with the antibodies.

[0225] The antibodies of the invention may be administered alone or in combination with other types of treatments (e.g., radiation therapy, chemotherapy, hormonal therapy, immunotherapy and anti-tumor agents). Generally, administration of products of a species origin or species reactivity (in the case of antibodies) that is the same species as that of the patient is preferred. Thus, in a preferred embodiment, human antibodies, fragments derivatives, analogs, or nucleic acids, are administered to a human patient for therapy or prophylaxis.

[0226] It is preferred to use high affinity and/or potent in vivo inhibiting and/or neutralizing antibodies against polypeptides or polynucleotides of the present invention, fragments or regions thereof, for both immunoassays directed to and therapy of disorders related to polynucleotides or polypeptides, including fragments thereof, of the present invention. Such antibodies, fragments, or regions, will preferably have an affinity for polynucleotides or polypeptides of the invention, including fragments thereof. Preferred binding affinities include those with a dissociation constant or Kd less than 5×10⁻² M, 10⁻² M, 5×10⁻³ M, 10⁻³ M, 5×10⁻⁴ M, 10⁻⁴ M, 5×10⁻⁵ M, 10⁻⁵ M, 5×10⁻⁶ M, 10⁻⁶ M, 5×10⁻⁷ M, 10⁻⁷ M, 5×10⁻⁸ M, 10⁻⁸ M, 5×10⁻⁹ M, 10⁻⁹ M, 5×10⁻¹⁰ M, 10⁻¹¹ M, 5×10⁻¹¹ M, 10⁻¹¹ M, 5×10⁻¹² M, 10⁻¹² M, 5×10⁻¹³ M, 10⁻¹³ M, 5×10⁻¹⁴ M, 10⁻¹⁴M, 5×10⁻¹⁵ M, and 10⁻¹⁵ M.

[0227] Gene Therapy

[0228] In a specific embodiment, nucleic acids comprising sequences encoding antibodies or functional derivatives thereof, are administered to treat, inhibit or prevent a disease or disorder associated with aberrant expression and/or activity of a polypeptide of the invention, by way of gene therapy. Gene therapy refers to therapy performed by the administration to a subject of an expressed or expressible nucleic acid. In this embodiment of the invention, the nucleic acids produce their encoded protein that mediates a therapeutic effect.

[0229] Any of the methods for gene therapy available in the art can be used according to the present invention. Exemplary methods are described below.

[0230] For general reviews of the methods of gene therapy, see Goldspiel et al., Clinical Pharmacy 12:488-505 (1993); Wu and Wu, Biotherapy 3:87-95 (1991); Tolstoshev, Ann. Rev. Pharmacol. Toxicol. 32:573-596 (1993); Mulligan, Science 260:926-932 (1993); and Morgan and Anderson, Ann. Rev. Biochem. 62:191-217 (1993); May, TIBTECH 11(5):155-215 (1993). Methods commonly known in the art of recombinant DNA technology which can be used are described in Ausubel et al. (eds.), Current Protocols in Molecular Biology, John Wiley & Sons, NY (1993); and Kriegler, Gene Transfer and Expression, A Laboratory Manual, Stockton Press, NY (1990).

[0231] In a preferred aspect, the compound comprises nucleic acid sequences encoding an antibody, said nucleic acid sequences being part of expression vectors that express the antibody or fragments or chimeric proteins or heavy or light chains thereof in a suitable host. In particular, such nucleic acid sequences have promoters operably linked to the antibody coding region, said promoter being inducible or constitutive, and, optionally, tissue-specific. In another particular embodiment, nucleic acid molecules are used in which the antibody coding sequences and any other desired sequences are flanked by regions that promote homologous recombination at a desired site in the genome, thus providing for intrachromosomal expression of the antibody encoding nucleic acids (Koller and Smithies, Proc. Natl. Acad. Sci. USA 86:8932-8935 (1989); Zijlstra et al., Nature 342:435-438 (1989). In specific embodiments, the expressed antibody molecule is a single chain antibody; alternatively, the nucleic acid sequences include sequences encoding both the heavy and light chains, or fragments thereof, of the antibody.

[0232] Delivery of the nucleic acids into a patient may be either direct, in which case the patient is directly exposed to the nucleic acid or nucleic acid- carrying vectors, or indirect, in which case, cells are first transformed with the nucleic acids in vitro, then transplanted into the patient. These two approaches are known, respectively, as in vivo or ex vivo gene therapy.

[0233] In a specific embodiment, the nucleic acid sequences are directly administered in vivo, where it is expressed to produce the encoded product. This can be accomplished by any of numerous methods known in the art, e.g., by constructing them as part of an appropriate nucleic acid expression vector and administering it so that they become intracellular, e.g., by infection using defective or attenuated retrovirals or other viral vectors (see U.S. Pat. No. 4,980,286), or by direct injection of naked DNA, or by use of microparticle bombardment (e.g., a gene gun; Biolistic, Dupont), or coating with lipids or cell-surface receptors or transfecting agents, encapsulation in liposomes, microparticles, or microcapsules, or by administering them in linkage to a peptide which is known to enter the nucleus, by administering it in linkage to a ligand subject to receptor-mediated endocytosis (see, e.g., Wu and Wu, J. Biol. Chem. 262:4429-4432 (1987)) (which can be used to target cell types specifically expressing the receptors), etc. In another embodiment, nucleic acid-ligand complexes can be formed in which the ligand comprises a fusogenic viral peptide to disrupt endosomes, allowing the nucleic acid to avoid lysosomal degradation. In yet another embodiment, the nucleic acid can be targeted in vivo for cell specific uptake and expression, by targeting a specific receptor (see, e.g., PCT Publications WO 92/06180; WO 92/22635; WO92/20316; WO93/14188, WO 93/20221). Alternatively, the nucleic acid can be introduced intracellularly and incorporated within host cell DNA for expression, by homologous recombination (Koller and Smithies, Proc. Natl. Acad. Sci. USA 86:8932-8935 (1989); Zijlstra et al., Nature 342:435-438 (1989)).

[0234] In a specific embodiment, viral vectors that contains nucleic acid sequences encoding an antibody of the invention are used. For example, a retroviral vector can be used (see Miller et al., Meth. Enzymol. 217:581-599 (1993)). These retroviral vectors contain the components necessary for the correct packaging of the viral genome and integration into the host cell DNA. The nucleic acid sequences encoding the antibody to be used in gene therapy are cloned into one or more vectors, which facilitates delivery of the gene into a patient. More detail about retroviral vectors can be found in Boesen et al., Biotherapy 6:291-302 (1994), which describes the use of a retroviral vector to deliver the mdr1 gene to hematopoietic stem cells in order to make the stem cells more resistant to chemotherapy. Other references illustrating the use of retroviral vectors in gene therapy are: Clowes et al., J. Clin. Invest. 93:644-651 (1994); Kiem et al., Blood 83:1467-1473 (1994); Salmons and Gunzberg, Human Gene Therapy 4:129-141 (1993); and Grossman and Wilson, Curr. Opin. in Genetics and Devel. 3:110-114 (1993).

[0235] Adenoviruses are other viral vectors that can be used in gene therapy. Adenoviruses are especially attractive vehicles for delivering genes to respiratory epithelia. Adenoviruses naturally infect respiratory epithelia where they cause a mild disease. Other targets for adenovirus-based delivery systems are liver, the central nervous system, endothelial cells, and muscle. Adenoviruses have the advantage of being capable of infecting non-dividing cells. Kozarsky and Wilson, Current Opinion in Genetics and Development 3:499-503 (1993) present a review of adenovirus-based gene therapy. Bout et al., Human Gene Therapy 5:3-10 (1994) demonstrated the use of adenovirus vectors to transfer genes to the respiratory epithelia of rhesus monkeys. Other instances of the use of adenoviruses in gene therapy can be found in Rosenfeld et al., Science 252:431-434 (1991); Rosenfeld et al., Cell 68:143- 155 (1992); Mastrangeli et al., J. Clin. Invest. 91:225-234 (1993); PCT Publication WO94/12649; and Wang, et al., Gene Therapy 2:775-783 (1995). In a preferred embodiment, adenovirus vectors are used.

[0236] Adeno-associated virus (AAV) has also been proposed for use in gene therapy (Walsh et al., Proc. Soc. Exp. Biol. Med. 204:289-300 (1993); U.S. Pat. No. 5,436,146).

[0237] Another approach to gene therapy involves transferring a gene to cells in tissue culture by such methods as electroporation, lipofection, calcium phosphate mediated transfection, or viral infection. Usually, the method of transfer includes the transfer of a selectable marker to the cells. The cells are then placed under selection to isolate those cells that have taken up and are expressing the transferred gene. Those cells are then delivered to a patient.

[0238] In this embodiment, the nucleic acid is introduced into a cell prior to administration in vivo of the resulting recombinant cell. Such introduction can be carried out by any method known in the art, including but not limited to transfection, electroporation, microinjection, infection with a viral or bacteriophage vector containing the nucleic acid sequences, cell fusion, chromosome-mediated gene transfer, microcell-mediated gene transfer, spheroplast fusion, etc. Numerous techniques are known in the art for the introduction of foreign genes into cells (see, e.g., Loeffler and Behr, Meth. Enzymol. 217:599-618 (1993); Cohen et al., Meth. Enzymol. 217:618-644 (1993); Cline, Pharmac. Ther. 29:69-92m (1985) and may be used in accordance with the present invention, provided that the necessary developmental and physiological functions of the recipient cells are not disrupted. The technique should provide for the stable transfer of the nucleic acid to the cell, so that the nucleic acid is expressible by the cell and preferably heritable and expressible by its cell progeny.

[0239] The resulting recombinant cells can be delivered to a patient by various methods known in the art. Recombinant blood cells (e.g., hematopoietic stem or progenitor cells) are preferably administered intravenously. The amount of cells envisioned for use depends on the desired effect, patient state, etc., and can be determined by one skilled in the art.

[0240] Cells into which a nucleic acid can be introduced for purposes of gene therapy encompass any desired, available cell type, and include but are not limited to epithelial cells, endothelial cells, keratinocytes, fibroblasts, muscle cells, hepatocytes; blood cells such as Tlymphocytes, Blymphocytes, monocytes, macrophages, neutrophils, eosinophils, megakaryocytes, granulocytes; various stem or progenitor cells, in particular hematopoietic stem or progenitor cells, e.g., as obtained from bone marrow, umbilical cord blood, peripheral blood, fetal liver, etc.

[0241] In a preferred embodiment, the cell used for gene therapy is autologous to the patient.

[0242] In an embodiment in which recombinant cells are used in gene therapy, nucleic acid sequences encoding an antibody are introduced into the cells such that they are expressible by the cells or their progeny, and the recombinant cells are then administered in vivo for therapeutic effect. In a specific embodiment, stem or progenitor cells are used. Any stem and/or progenitor cells which can be isolated and maintained in vitro can potentially be used in accordance with this embodiment of the present invention (see e.g. PCT Publication WO 94/08598; Stemple and Anderson, Cell 71:973-985 (1992); Rheinwald, Meth. Cell Bio. 21A:229 (1980); and Pittelkow and Scott, Mayo Clinic Proc. 61:771 (1986)).

[0243] In a specific embodiment, the nucleic acid to be introduced for purposes of gene therapy comprises an inducible promoter operably linked to the coding region, such that expression of the nucleic acid is controllable by controlling the presence or absence of the appropriate inducer of transcription. Demonstration of Therapeutic or Prophylactic Activity

[0244] The compounds or pharmaceutical compositions of the invention are preferably tested in vitro, and then in vivo for the desired therapeutic or prophylactic activity, prior to use in humans. For example, in vitro assays to demonstrate the therapeutic or prophylactic utility of a compound or pharmaceutical composition include, the effect of a compound on a cell line or a patient tissue sample. The effect of the compound or composition on the cell line and/or tissue sample can be determined utilizing techniques known to those of skill in the art including, but not limited to, rosette formation assays and cell lysis assays. In accordance with the invention, in vitro assays which can be used to determine whether administration of a specific compound is indicated, include in vitro cell culture assays in which a patient tissue sample is grown in culture, and exposed to or otherwise administered a compound, and the effect of such compound upon the tissue sample is observed.

[0245] Therapeutic/Prophylactic Administration and Composition

[0246] The invention provides methods of treatment, inhibition and prophylaxis by administration to a subject of an effective amount of a compound or pharmaceutical composition of the invention, preferably a polypeptide or antibody of the invention. In a preferred aspect, the compound is substantially purified (e.g., substantially free from substances that limit its effect or produce undesired side-effects). The subject is preferably an animal, including but not limited to animals such as cows, pigs, horses, chickens, cats, dogs, etc., and is preferably a mammal, and most preferably human.

[0247] Formulations and methods of administration that can be employed when the compound comprises a nucleic acid or an immunoglobulin are described above; additional appropriate formulations and routes of administration can be selected from among those described herein below.

[0248] Various delivery systems are known and can be used to administer a compound of the invention, e.g., encapsulation in liposomes, microparticles, microcapsules, recombinant cells capable of expressing the compound, receptor-mediated endocytosis (see, e.g., Wu and Wu, J. Biol. Chem. 262:4429-4432 (1987)), construction of a nucleic acid as part of a retroviral or other vector, etc. Methods of introduction include but are not limited to intradermal, intramuscular, intraperitoneal, intravenous, subcutaneous, intranasal, epidural, and oral routes. The compounds or compositions may be administered by any convenient route, for example by infusion or bolus injection, by absorption through epithelial or mucocutaneous linings (e.g., oral mucosa, rectal and intestinal mucosa, etc.) and may be administered together with other biologically active agents. Administration can be systemic or local. In addition, it may be desirable to introduce the pharmaceutical compounds or compositions of the invention into the central nervous system by any suitable route, including intraventricular and intrathecal injection; intraventricular injection may be facilitated by an intraventricular catheter, for example, attached to a reservoir, such as an Ommaya reservoir. Pulmonary administration can also be employed, e.g., by use of an inhaler or nebulizer, and formulation with an aerosolizing agent.

[0249] In a specific embodiment, it may be desirable to administer the pharmaceutical compounds or compositions of the invention locally to the area in need of treatment; this may be achieved by, for example, and not by way of limitation, local infusion during surgery, topical application, e.g., in conjunction with a wound dressing after surgery, by injection, by means of a catheter, by means of a suppository, or by means of an implant, said implant being of a porous, non-porous, or gelatinous material, including membranes, such as sialastic membranes, or fibers. Preferably, when administering a protein, including an antibody, of the invention, care must be taken to use materials to which the protein does not absorb.

[0250] In another embodiment, the compound or composition can be delivered in a vesicle, in particular a liposome (see Langer, Science 249:1527-1533 (1990); Treat et al., in Liposomes in the Therapy of Infectious Disease and Cancer, Lopez-Berestein and Fidler (eds.), Liss, New York, pp. 353- 365 (1989); Lopez-Berestein, ibid., pp. 317-327; see generally ibid.)

[0251] In yet another embodiment, the compound or composition can be delivered in a controlled release system. In one embodiment, a pump may be used (see Langer, supra; Sefton, CRC Crit. Ref. Biomed. Eng. 14:201 (1987); Buchwald et al., Surgery 88:507 (1980); Saudek et al., N. Engl. J. Med. 321:574 (1989)). In another embodiment, polymeric materials can be used (see Medical Applications of Controlled Release, Langer and Wise (eds.), CRC Pres., Boca Raton, Florida (1974); Controlled Drug Bioavailability, Drug Product Design and Performance, Smolen and Ball (eds.), Wiley, New York (1984); Ranger and Peppas, J., Macromol. Sci. Rev. Macromol. Chem. 23:61 (1983); see also Levy et al., Science 228:190 (1985); During et al., Ann. Neurol. 25:351 (1989); Howard et al., J.Neurosurg. 71:105 (1989)). In yet another embodiment, a controlled release system can be placed in proximity of the therapeutic target, i.e., the brain, thus requiring only a fraction of the systemic dose (see, e.g., Goodson, in Medical Applications of Controlled Release, supra, vol. 2, pp. 115-138 (1984)).

[0252] Other controlled release systems are discussed in the review by Langer (Science 249:1527-1533 (1990)).

[0253] In a specific embodiment where the compound of the invention is a nucleic acid encoding a protein, the nucleic acid can be administered in vivo to promote expression of its encoded protein, by constructing it as part of an appropriate nucleic acid expression vector and administering it so that it becomes intracellular, e.g., by use of a retroviral vector (see U.S. Pat. No. 4,980,286), or by direct injection, or by use of microparticle bombardment (e.g., a gene gun; Biolistic, Dupont), or coating with lipids or cell-surface receptors or transfecting agents, or by administering it in linkage to a homeobox- like peptide which is known to enter the nucleus (see e.g., Joliot et al., Proc. Natl. Acad. Sci. USA 88:1864-1868 (1991)), etc. Alternatively, a nucleic acid can be introduced intracellularly and incorporated within host cell DNA for expression, by homologous recombination.

[0254] The present invention also provides pharmaceutical compositions. Such compositions comprise a therapeutically effective amount of a compound, and a pharmaceutically acceptable carrier. In a specific embodiment, the term “pharmaceutically acceptable” means approved by a regulatory agency of the Federal or a state government or listed in the U.S. Pharmacopeia or other generally recognized pharmacopeia for use in animals, and more particularly in humans. The term “carrier” refers to a diluent, adjuvant, excipient, or vehicle with which the therapeutic is administered. Such pharmaceutical carriers can be sterile liquids, such as water and oils, including those of petroleum, animal, vegetable or synthetic origin, such as peanut oil, soybean oil, mineral oil, sesame oil and the like. Water is a preferred carrier when the pharmaceutical composition is administered intravenously. Saline solutions and aqueous dextrose and glycerol solutions can also be employed as liquid carriers, particularly for injectable solutions. Suitable pharmaceutical excipients include starch, glucose, lactose, sucrose, gelatin, malt, rice, flour, chalk, silica gel, sodium stearate, glycerol monostearate, talc, sodium chloride, dried skim milk, glycerol, propylene, glycol, water, ethanol and the like. The composition, if desired, can also contain minor amounts of wetting or emulsifying agents, or pH buffering agents. These compositions can take the form of solutions, suspensions, emulsion, tablets, pills, capsules, powders, sustained-release formulations and the like. The composition can be formulated as a suppository, with traditional binders and carriers such as triglycerides. Oral formulation can include standard carriers such as pharmaceutical grades of mannitol, lactose, starch, magnesium stearate, sodium saccharine, cellulose, magnesium carbonate, etc. Examples of suitable pharmaceutical carriers are described in “Remington's Pharmaceutical Sciences” by E. W. Martin. Such compositions will contain a therapeutically effective amount of the compound, preferably in purified form, together with a suitable amount of carrier so as to provide the form for proper administration to the patient. The formulation should suit the mode of administration.

[0255] In a preferred embodiment, the composition is formulated in accordance with routine procedures as a pharmaceutical composition adapted for intravenous administration to human beings. Typically, compositions for intravenous administration are solutions in sterile isotonic aqueous buffer. Where necessary, the composition may also include a solubilizing agent and a local anesthetic such as lignocaine to ease pain at the site of the injection. Generally, the ingredients are supplied either separately or mixed together in unit dosage form, for example, as a dry lyophilized powder or water free concentrate in a hermetically sealed container such as an ampoule or sachette indicating the quantity of active agent. Where the composition is to be administered by infusion, it can be dispensed with an infusion bottle containing sterile pharmaceutical grade water or saline. Where the composition is administered by injection, an ampoule of sterile water for injection or saline can be provided so that the ingredients may be mixed prior to administration.

[0256] The compounds of the invention can be formulated as neutral or salt forms. Pharmaceutically acceptable salts include those formed with anions such as those derived from hydrochloric, phosphoric, acetic, oxalic, tartaric acids, etc., and those formed with cations such as those derived from sodium, potassium, ammonium, calcium, ferric hydroxides, isopropylamine, triethylamine, 2-ethylamino ethanol, histidine, procaine, etc.

[0257] The amount of the compound of the invention which will be effective in the treatment, inhibition and prevention of a disease or disorder associated with aberrant expression and/or activity of a polypeptide of the invention can be determined by standard clinical techniques. In addition, in vitro assays may optionally be employed to help identify optimal dosage ranges. The precise dose to be employed in the formulation will also depend on the route of administration, and the seriousness of the disease or disorder, and should be decided according to the judgment of the practitioner and each patient's circumstances. Effective doses may be extrapolated from dose-response curves derived from in vitro or animal model test systems.

[0258] For antibodies, the dosage administered to a patient is typically 0.1 mg/kg to 100 mg/kg of the patient's body weight. Preferably, the dosage administered to a patient is between 0.1 mg/kg and 20 mg/kg of the patient's body weight, more preferably 1 mg/kg to 10 mg/kg of the patient's body weight. Generally, human antibodies have a longer half-life within the human body than antibodies from other species due to the immune response to the foreign polypeptides. Thus, lower dosages of human antibodies and less frequent administration is often possible. Further, the dosage and frequency of administration of antibodies of the invention may be reduced by enhancing uptake and tissue penetration (e.g., into the brain) of the antibodies by modifications such as, for example, lipidation.

[0259] The invention also provides a pharmaceutical pack or kit comprising one or more containers filled with one or more of the ingredients of the pharmaceutical compositions of the invention. Optionally associated with such container(s) can be a notice in the form prescribed by a governmental agency regulating the manufacture, use or sale of pharmaceuticals or biological products, which notice reflects approval by the agency of manufacture, use or sale for human administration.

[0260] Diagnosis and Imaging

[0261] Labeled antibodies, and derivatives and analogs thereof, which specifically bind to a polypeptide of interest can be used for diagnostic purposes to detect, diagnose, or monitor diseases, disorders, and/or conditions associated with the aberrant expression and/or activity of a polypeptide of the invention. The invention provides for the detection of aberrant expression of a polypeptide of interest, comprising (a) assaying the expression of the polypeptide of interest in cells or body fluid of an individual using one or more antibodies specific to the polypeptide interest and (b) comparing the level of gene expression with a standard gene expression level, whereby an increase or decrease in the assayed polypeptide gene expression level compared to the standard expression level is indicative of aberrant expression.

[0262] The invention provides a diagnostic assay for diagnosing a disorder, comprising (a) assaying the expression of the polypeptide of interest in cells or body fluid of an individual using one or more antibodies specific to the polypeptide interest and (b) comparing the level of gene expression with a standard gene expression level, whereby an increase or decrease in the assayed polypeptide gene expression level compared to the standard expression level is indicative of a particular disorder. With respect to cancer, the presence of a relatively high amount of transcript in biopsied tissue from an individual may indicate a predisposition for the development of the disease, or may provide a means for detecting the disease prior to the appearance of actual clinical symptoms. A more definitive diagnosis of this type may allow health professionals to employ preventative measures or aggressive treatment earlier thereby preventing the development or further progression of the cancer.

[0263] Antibodies of the invention can be used to assay protein levels in a biological sample using classical immunohistological methods known to those of skill in the art (e.g., see Jalkanen, et al., J. Cell. Biol. 101:976-985 (1985); Jalkanen, et al., J. Cell. Biol. 105:3087-3096 (1987)). Other antibody-based methods useful for detecting protein gene expression include immunoassays, such as the enzyme linked immunosorbent assay (ELISA) and the radioimmunoassay (RIA). Suitable antibody assay labels are known in the art and include enzyme labels, such as, glucose oxidase; radioisotopes, such as iodine (125I, 121I), carbon (14C), sulfur (35S), tritium (3H), indium (112In), and technetium (99Tc); luminescent labels, such as luminol; and fluorescent labels, such as fluorescein and rhodamine, and biotin.

[0264] One aspect of the invention is the detection and diagnosis of a disease or disorder associated with aberrant expression of a polypeptide of interest in an animal, preferably a mammal and most preferably a human. In one embodiment, diagnosis comprises: a) administering (for example, parenterally, subcutaneously, or intraperitoneally) to a subject an effective amount of a labeled molecule which specifically binds to the polypeptide of interest; b) waiting for a time interval following the administering for permitting the labeled molecule to preferentially concentrate at sites in the subject where the polypeptide is expressed (and for unbound labeled molecule to be cleared to background level); c) determining background level; and d) detecting the labeled molecule in the subject, such that detection of labeled molecule above the background level indicates that the subject has a particular disease or disorder associated with aberrant expression of the polypeptide of interest. Background level can be determined by various methods including, comparing the amount of labeled molecule detected to a standard value previously determined for a particular system.

[0265] It will be understood in the art that the size of the subject and the imaging system used will determine the quantity of imaging moiety needed to produce diagnostic images. In the case of a radioisotope moiety, for a human subject, the quantity of radioactivity injected will normally range from about 5 to 20 millicuries of 99mTc. The labeled antibody or antibody fragment will then preferentially accumulate at the location of cells which contain the specific protein. In vivo tumor imaging is described in S. W. Burchiel et al., “Immunopharmacokinetics of Radiolabeled Antibodies and Their Fragments.” (Chapter 13 in Tumor Imaging: The Radiochemical Detection of Cancer, S. W. Burchiel and B. A. Rhodes, eds., Masson Publishing Inc. (1982).

[0266] Depending on several variables, including the type of label used and the mode of administration, the time interval following the administration for permitting the labeled molecule to preferentially concentrate at sites in the subject and for unbound labeled molecule to be cleared to background level is 6 to 48 hours or 6 to 24 hours or 6 to 12 hours. In another embodiment the time interval following administration is 5 to 20 days or 5 to 10 days.

[0267] In an embodiment, monitoring of the disease or disorder is carried out by repeating the method for diagnosing the disease or disease, for example, one month after initial diagnosis, six months after initial diagnosis, one year after initial diagnosis, etc.

[0268] Presence of the labeled molecule can be detected in the patient using methods known in the art for in vivo scanning. These methods depend upon the type of label used. Skilled artisans will be able to determine the appropriate method for detecting a particular label. Methods and devices that may be used in the diagnostic methods of the invention include, but are not limited to, computed tomography (CT), whole body scan such as position emission tomography (PET), magnetic resonance imaging (MRI), and sonography.

[0269] In a specific embodiment, the molecule is labeled with a radioisotope and is detected in the patient using a radiation responsive surgical instrument (Thurston et al., U.S. Pat. No. 5,441,050). In another embodiment, the molecule is labeled with a fluorescent compound and is detected in the patient using a fluorescence responsive scanning instrument. In another embodiment, the molecule is labeled with a positron emitting metal and is detected in the patent using positron emission-tomography. In yet another embodiment, the molecule is labeled with a paramagnetic label and is detected in a patient using magnetic resonance imaging (MRI).

[0270] Kits

[0271] The present invention provides kits that can be used in the above methods. In one embodiment, a kit comprises an antibody of the invention, preferably a purified antibody, in one or more containers. In a specific embodiment, the kits of the present invention contain a substantially isolated polypeptide comprising an epitope which is specifically immunoreactive with an antibody included in the kit. Preferably, the kits of the present invention further comprise a control antibody which does not react with the polypeptide of interest. In another specific embodiment, the kits of the present invention contain a means for detecting the binding of an antibody to a polypeptide of interest (e.g., the antibody may be conjugated to a detectable substrate such as a fluorescent compound, an enzymatic substrate, a radioactive compound or a luminescent compound, or a second antibody which recognizes the first antibody may be conjugated to a detectable substrate).

[0272] In another specific embodiment of the present invention, the kit is a diagnostic kit for use in screening serum containing antibodies specific against proliferative and/or cancerous polynucleotides and polypeptides. Such a kit may include a control antibody that does not react with the polypeptide of interest. Such a kit may include a substantially isolated polypeptide antigen comprising an epitope which is specifically immunoreactive with at least one anti-polypeptide antigen antibody. Further, such a kit includes means for detecting the binding of said antibody to the antigen (e.g., the antibody may be conjugated to a fluorescent compound such as fluorescein or rhodamine which can be detected by flow cytometry). In specific embodiments, the kit may include a recombinantly produced or chemically synthesized polypeptide antigen. The polypeptide antigen of the kit may also be attached to a solid support.

[0273] In a more specific embodiment the detecting means of the above-described kit includes a solid support to which said polypeptide antigen is attached. Such a kit may also include a non-attached reporter-labeled anti-human antibody. In this embodiment, binding of the antibody to the polypeptide antigen can be detected by binding of the said reporter-labeled antibody.

[0274] In an additional embodiment, the invention includes a diagnostic kit for use in screening serum containing antigens of the polypeptide of the invention. The diagnostic kit includes a substantially isolated antibody specifically immunoreactive with polypeptide or polynucleotide antigens, and means for detecting the binding of the polynucleotide or polypeptide antigen to the antibody. In one embodiment, the antibody is attached to a solid support. In a specific embodiment, the antibody may be a monoclonal antibody. The detecting means of the kit may include a second, labeled monoclonal antibody. Alternatively, or in addition, the detecting means may include a labeled, competing antigen.

[0275] In one diagnostic configuration, test serum is reacted with a solid phase reagent having a surface-bound antigen obtained by the methods of the present invention. After binding with specific antigen antibody to the reagent and removing unbound serum components by washing, the reagent is reacted with reporter-labeled anti-human antibody to bind reporter to the reagent in proportion to the amount of bound anti-antigen antibody on the solid support. The reagent is again washed to remove unbound labeled antibody, and the amount of reporter associated with the reagent is determined. Typically, the reporter is an enzyme which is detected by incubating the solid phase in the presence of a suitable fluorometric, luminescent or calorimetric substrate (Sigma, St. Louis, Mo.).

[0276] The solid surface reagent in the above assay is prepared by known techniques for attaching protein material to solid support material, such as polymeric beads, dip sticks, 96-well plate or filter material. These attachment methods generally include non-specific adsorption of the protein to the support or covalent attachment of the protein, typically through a free amine group, to a chemically reactive group on the solid support, such as an activated carboxyl, hydroxyl, or aldehyde group. Alternatively, streptavidin coated plates can be used in conjunction with biotinylated antigen(s).

[0277] Thus, the invention provides an assay system or kit for carrying out this diagnostic method. The kit generally includes a support with surface- bound recombinant antigens, and a reporter-labeled anti-human antibody for detecting surface-bound anti-antigen antibody.

[0278] Uses of the Polynucleotides

[0279] Each of the polynucleotides identified herein can be used in numerous ways as reagents. The following description should be considered exemplary and utilizes known techniques.

[0280] The colorectal cancer antigen polynucleotides of the present invention are useful for chromosome identification. There exists an ongoing need to identify new chromosome markers, since few chromosome marking reagents, based on actual sequence data (repeat polymorphisms), are presently available. Each sequence is specifically targeted to and can hybridize with a particular location on an individual human chromosome, thus each polynucleotide of the present invention can routinely be used as a chromosome marker using techniques known in the art.

[0281] Briefly, sequences can be mapped to chromosomes by preparing PCR primers (preferably at least 15 bp (e.g., 15-25 bp) from the sequences shown in SEQ ID NO:X, or the complement thereto. Primers can optionally be selected using computer analysis so that primers do not span more than one predicted exon in the genomic DNA. These primers are then used for PCR screening of somatic cell hybrids containing individual human chromosomes. Only those hybrids containing the human gene corresponding to SEQ ID NO:X will yield an amplified fragment.

[0282] Similarly, somatic hybrids provide a rapid method of PCR mapping the polynucleotides to particular chromosomes. Three or more clones can be assigned per day using a single thermal cycler. Moreover, sublocalization of the polynucleotides can be achieved with panels of specific chromosome fragments. Other gene mapping strategies that can be used include in situ hybridization, prescreening with labeled flow-sorted chromosomes, preselection by hybridization to construct chromosome specific-cDNA libraries, and computer mapping techniques (See, e.g., Shuler, Trends Biotechnol 16:456-459 (1998) which is hereby incorporated by reference in its entirety).

[0283] Precise chromosomal location of the polynucleotides can also be achieved using fluorescence in situ hybridization (FISH) of a metaphase chromosomal spread. This technique uses polynucleotides as short as 500 or 600 bases; however, polynucleotides 2,000-4,000 bp are preferred. For a review of this technique, see Verma et al., “Human Chromosomes: a Manual of Basic Techniques,” Pergamon Press, New York (1988).

[0284] For chromosome mapping, the polynucleotides can be used individually (to mark a single chromosome or a single site on that chromosome) or in panels (for marking multiple sites and/or multiple chromosomes).

[0285] Thus, the present invention also provides a method for chromosomal localization which involves (a) preparing PCR primers from the polynucleotide sequences in Table 3 and SEQ ID NO:X and (b) screening somatic cell hybrids containing individual chromosomes.

[0286] The polynucleotides of the present invention would likewise be useful for radiation hybrid mapping, HAPPY mapping, and long range restriction mapping. For a review of these techniques and others known in the art, see, e.g. Dear, “Genome Mapping: A Practical Approach,” IRL Press at Oxford University Press, London (1997); Aydin, J. Mol. Med. 77:691-694 (1999); Hacia et al., Mol. Psychiatry 3:483-492 (1998); Herrick et al., Chromosome Res. 7:409-423 (1999); Hamilton et al., Methods Cell Biol. 62:265-280 (2000); and/or Ott, J. Hered. 90:68-70 (1999) each of which is hereby incorporated by reference in its entirety.

[0287] Once a polynucleotide has been mapped to a precise chromosomal location, the physical position of the polynucleotide can be used in linkage analysis. Linkage analysis establishes coinheritance between a chromosomal location and presentation of a particular disease. (Disease mapping data are found, for example, in V. McKusick, Mendelian Inheritance in Man (available on line through Johns Hopkins University Welch Medical Library).) Assuming 1 megabase mapping resolution and one gene per 20 kb, a cDNA precisely localized to a chromosomal region associated with the disease could be one of 50-500 potential causative genes.

[0288] Thus, once coinheritance is established, differences in a polynucleotide of the invention and the corresponding gene between affected and unaffected individuals can be examined. First, visible structural alterations in the chromosomes, such as deletions or translocations, are examined in chromosome spreads or by PCR. If no structural alterations exist, the presence of point mutations are ascertained. Mutations observed in some or all affected individuals, but not in normal individuals, indicates that the mutation may cause the disease. However, complete sequencing of the polypeptide and the corresponding gene from several normal individuals is required to distinguish the mutation from a polymorphism. If a new polymorphism is identified, this polymorphic polypeptide can be used for further linkage analysis.

[0289] Furthermore, increased or decreased expression of the gene in affected individuals as compared to unaffected individuals can be assessed using the polynucleotides of the invention. Any of these alterations (altered expression, chromosomal rearrangement, or mutation) can be used as a diagnostic or prognostic marker.

[0290] Thus, the invention provides a method of detecting increased or decreased expression levels of the colorectal cancer polynucleotides in affected individuals as compared to unaffected individuals using polynucleotides of the present invention and techniques known in the art, including but not limited to the method described in Example 11. Any of these alterations (altered expression, chromosomal rearrangement, or mutation) can be used as a diagnostic or prognostic marker.

[0291] Thus, the invention also provides a diagnostic method useful during diagnosis of a colon and/or rectal related disorder, including colorectal cancer, involving measuring the expression level of colorectal cancer polynucleotides in colon and/or rectal tissue or other cells or body fluid from an individual and comparing the measured gene expression level with a standard colorectal cancer polynucleotide expression level, whereby an increase or decrease in the gene expression level compared to the standard is indicative of a colon and/or rectal related disorder.

[0292] In still another embodiment, the invention includes a kit for analyzing samples for the presence of proliferative and/or cancerous polynucleotides derived from a test subject. In a general embodiment, the kit includes at least one polynucleotide probe containing a nucleotide sequence that will specifically hybridize with a polynucleotide of the invention and a suitable container. In a specific embodiment, the kit includes two polynucleotide probes defining an internal region of the polynucleotide of the invention, where each probe has one strand containing a 31'mer-end internal to the region. In a further embodiment, the probes may be useful as primers for polymerase chain reaction amplification.

[0293] Where a diagnosis of a colon and/or rectal related disorder, including, for example, diagnosis of a tumor, has already been made according to conventional methods, the present invention is useful as a prognostic indicator, whereby patients exhibiting enhanced or depressed colorectal cancer polynucleotide expression will experience a worse clinical outcome relative to patients expressing the gene at a level nearer the standard level.

[0294] By “measuring the expression level of colorectal cancer polynucleotides” is intended qualitatively or quantitatively measuring or estimating the level of the colorectal cancer polypeptide or the level of the mRNA encoding the colorectal cancer polypeptide in a first biological sample either directly (e.g., by determining or estimating absolute protein level or mRNA level) or relatively (e.g., by comparing to the colorectal cancer polypeptide level or mRNA level in a second biological sample). Preferably, the colorectal cancer polypeptide level or mRNA level in the first biological sample is measured or estimated and compared to a standard colorectal cancer polypeptide level or mRNA level, the standard being taken from a second biological sample obtained from an individual not having the colon and/or rectal related disorder or being determined by averaging levels from a population of individuals not having a colon and/or rectal related disorder. As will be appreciated in the art, once a standard colorectal cancer polypeptide level or mRNA level is known, it can be used repeatedly as a standard for comparison.

[0295] By “biological sample” is intended any biological sample obtained from an individual, body fluid, cell line, tissue culture, or other source which contains colorectal cancer polypeptide or the corresponding mRNA. As indicated, biological samples include body fluids (such as lymph, sera, plasma, urine, bile, synovial fluid and spinal fluid) which contain the colorectal cancer polypeptide, colon tissue, rectal tissue, and other tissue sources found to express the colorectal cancer polypeptide. Methods for obtaining tissue biopsies and body fluids from mammals are well known in the art. Where the biological sample is to include mRNA, a tissue biopsy is the preferred source.

[0296] The method(s) provided above may preferrably be applied in a diagnostic method and/or kits in which polynucleotides and/or polypeptides of the invention are attached to a solid support. In one exemplary method, the support may be a “gene chip” or a “biological chip” as described in U.S. Pat. Nos. 5,837,832, 5,874,219, and 5,856,174. Further, such a gene chip with colorectal cancer polynucleotides attached may be used to identify polymorphisms between the colorectal cancer polynucleotide sequences, with polynucleotides isolated from a test subject. The knowledge of such polymorphisms (i.e. their location, as well as, their existence) would be beneficial in identifying disease loci for many disorders, such as for example, in neural disorders, immune system disorders, muscular disorders, reproductive disorders, gastrointestinal disorders, pulmonary disorders, cardiovascular disorders, renal disorders, proliferative disorders, and/or cancerous diseases and conditions, though most preferably in colon related proliferative, and/or cancerous diseases and conditions. Such a method is described in U.S. Pat. Nos. 5,858,659 and 5,856,104. The US Patents referenced supra are hereby incorporated by reference in their entirety herein.

[0297] The present invention encompasses colorectal cancer polynucleotides that are chemically synthesized, or reproduced as peptide nucleic acids (PNA), or according to other methods known in the art. The use of PNAs would serve as the preferred form if the polynucleotides of the invention are incorporated onto a solid support, or gene chip. For the purposes of the present invention, a peptide nucleic acid (PNA) is a polyamide type of DNA analog and the monomeric units for adenine, guanine, thymine and cytosine are available commercially (Perceptive Biosystems). Certain components of DNA, such as phosphorus, phosphorus oxides, or deoxyribose derivatives, are not present in PNAs. As disclosed by P. E. Nielsen, M. Egholm, R. H. Berg and 0. Buchardt, Science 254, 1497 (1991); and M. Egholm, O. Buchardt, L. Christensen, C. Behrens, S. M. Freier, D. A. Driver, R. H. Berg, S. K. Kim, B. Norden, and P. E. Nielsen, Nature 365, 666 (1993), PNAs bind specifically and tightly to complementary DNA strands and are not degraded by nucleases. In fact, PNA binds more strongly to DNA than DNA itself does. This is probably because there is no electrostatic repulsion between the two strands, and also the polyamide backbone is more flexible. Because of this, PNA/DNA duplexes bind under a wider range of stringency conditions than DNA/DNA duplexes, making it easier to perform multiplex hybridization. Smaller probes can be used than with DNA due to the strong binding. In addition, it is more likely that single base mismatches can be determined with PNA/DNA hybridization because a single mismatch in a PNA/DNA 15-mer lowers the melting point (T.sub.m) by 8°-20° C., vs. 4°-16° C. for the DNA/DNA 15-mer duplex. Also, the absence of charge groups in PNA means that hybridization can be done at low ionic strengths and reduce possible interference by salt during the analysis.

[0298] The present invention have uses which include, but are not limited to, detecting cancer in mammals. In particular the invention is useful during diagnosis of pathological cell proliferative neoplasias which include, but are not limited to: acute myelogenous leukemias including acute monocytic leukemia, acute myeloblastic leukemia, acute promyelocytic leukemia, acute myelomonocytic leukemia, acute erythroleukemia, acute megakaryocytic leukemia, and acute undifferentiated leukemia, etc.; and chronic myelogenous leukemias including chronic myelomonocytic leukemia, chronic granulocytic leukemia, etc. Preferred mammals include monkeys, apes, cats, dogs, cows, pigs, horses, rabbits and humans. Particularly preferred are humans.

[0299] Pathological cell proliferative disorders are often associated with inappropriate activation of proto-oncogenes. (Gelmann, E. P. et al., “The Etiology of Acute Leukemia: Molecular Genetics and Viral Oncology,” in Neoplastic Diseases of the Blood, Vol 1., Wiernik, P. H. et al. eds., 161-182 (1985)). Neoplasias are now believed to result from the qualitative alteration of a normal cellular gene product, or from the quantitative modification of gene expression by insertion into the chromosome of a viral sequence, by chromosomal translocation of a gene to a more actively transcribed region, or by some other mechanism. (Gelmann et al., supra) It is likely that mutated or altered expression of specific genes is involved in the pathogenesis of some leukemias, among other tissues and cell types. (Gelmann et al., supra) Indeed, the human counterparts of the oncogenes involved in some animal neoplasias have been amplified or translocated in some cases of human leukemia and carcinoma. (Gelmann et al., supra) &p For example, c-myc expression is highly amplified in the non-lymphocytic leukemia cell line HL-60. When HL-60 cells are chemically induced to stop proliferation, the level of c-myc is found to be downregulated. (International Publication Number WO 91/15580). However, it has been shown that exposure of HL-60 cells to a DNA construct that is complementary to the 5′ end of c-myc or c-myb blocks translation of the corresponding mRNAs which downregulates expression of the c-myc or c-myb proteins and causes arrest of cell proliferation and differentiation of the treated cells. (International Publication Number WO 91/15580; Wickstrom et al., Proc. Natl. Acad. Sci. 85:1028 (1988); Anfossi et al., Proc. Natl. Acad. Sci. 86:3379 (1989)). However, the skilled artisan would appreciate the present invention's usefulness is not limited to treatment of proliferative disorders of hematopoietic cells and tissues, in light of the numerous cells and cell types of varying origins which are known to exhibit proliferative phenotypes.

[0300] In addition to the foregoing, a colorectal cancer antigen polynucleotide can be used to control gene expression through triple helix formation or through antisense DNA or RNA. Antisense techniques are discussed, for example, in Okano, J. Neurochem. 56: 560 (1991); “Oligodeoxynucleotides as Antisense Inhibitors of Gene Expression, CRC Press, Boca Raton, Fla. (1988). Triple helix formation is discussed in, for instance Lee et al., Nucleic Acids Research 6: 3073 (1979); Cooney et al., Science 241: 456 (1988); and Dervan et al., Science 251: 1360 (1991). Both methods rely on binding of the polynucleotide to a complementary DNA or RNA. For these techniques, preferred polynucleotides are usually oligonucleotides 20 to 40 bases in length and complementary to either the region of the gene involved in transcription (triple helix—see Lee et al., Nucl. Acids Res. 6:3073 (1979); Cooney et al., Science 241:456 (1988); and Dervan et al., Science 251:1360 (1991)) or to the mRNA itself (antisense—Okano, J. Neurochem. 56:560 (1991); Oligodeoxy-nucleotides as Antisense Inhibitors of Gene Expression, CRC Press, Boca Raton, Fla. (1988).) Triple helix formation optimally results in a shut-off of RNA transcription from DNA, while antisense RNA hybridization blocks translation of an mRNA molecule into polypeptide. The oligonucleotide described above can also be delivered to cells such that the antisense RNA or DNA may be expressed in vivo to inhibit production of polypeptide of the present invention antigens. Both techniques are effective in model systems, and the information disclosed herein can be used to design antisense or triple helix polynucleotides in an effort to treat disease, and in particular, for the treatment of proliferative diseases and/or conditions.

[0301] Polynucleotides of the present invention are also useful in gene therapy. One goal of gene therapy is to insert a normal gene into an organism having a defective gene, in an effort to correct the genetic defect. The polynucleotides disclosed in the present invention offer a means of targeting such genetic defects in a highly accurate manner. Another goal is to insert a new gene that was not present in the host genome, thereby producing a new trait in the host cell.

[0302] The polynucleotides are also useful for identifying individuals from minute biological samples. The United States military, for example, is considering the use of restriction fragment length polymorphism (RFLP) for identification of its personnel. In this technique, an individual's genomic DNA is digested with one or more restriction enzymes, and probed on a Southern blot to yield unique bands for identifying personnel. This method does not suffer from the current limitations of “Dog Tags” which can be lost, switched, or stolen, making positive identification difficult. The polynucleotides of the present invention can be used as additional DNA markers for RFLP.

[0303] The polynucleotides of the present invention can also be used as an alternative to RFLP, by determining the actual base-by-base DNA sequence of selected portions of an individual's genome. These sequences can be used to prepare PCR primers for amplifying and isolating such selected DNA, which can then be sequenced. Using this technique, individuals can be identified because each individual will have a unique set of DNA sequences. Once an unique ID database is established for an individual, positive identification of that individual, living or dead, can be made from extremely small tissue samples.

[0304] Forensic biology also benefits from using DNA-based identification techniques as disclosed herein. DNA sequences taken from very small biological samples such as tissues, e.g., hair or skin, or body fluids, e.g., blood, saliva, semen, synovial fluid, amniotic fluid, breast milk, lymph, pulmonary sputum or surfactant, urine, fecal matter, etc., can be amplified using PCR. In one prior art technique, gene sequences amplified from polymorphic loci, such as DQa class II HLA gene, are used in forensic biology to identify individuals. (Erlich, H., PCR Technology, Freeman and Co. (1992).) Once these specific polymorphic loci are amplified, they are digested with one or more restriction enzymes, yielding an identifying set of bands on a Southern blot probed with DNA corresponding to the DQa class II HLA gene. Similarly, polynucleotides of the present invention can be used as polymorphic markers for forensic purposes.

[0305] There is also a need for reagents capable of identifying the source of a particular tissue. Such need arises, for example, in forensics when presented with tissue of unknown origin. Appropriate reagents can comprise, for example, DNA probes or primers specific to colorectal or colorectal cancer polynucleotides prepared from the sequences of the present invention. Panels of such reagents can identify tissue by species and/or by organ type. In a similar fashion, these reagents can be used to screen tissue cultures for contamination.

[0306] The polynucleotides of the present invention are also useful as hybridization probes for differential identification of the tissue(s) or cell type(s) present in a biological sample. Similarly, polypeptides and antibodies directed to polypeptides of the present invention are useful to provide immunological probes for differential identification of the tissue(s) (e.g., immunohistochemistry assays) or cell type(s) (e.g., immunocytochemistry assays). In addition, for a number of disorders of the above tissues or cells, significantly higher or lower levels of gene expression of the polynucleotides/polypeptides of the present invention may be detected in certain tissues (e.g., tissues expressing polypeptides and/or polynucleotides of the present invention, colon, rectal and colorectal cancer tissues and/or cancerous and/or wounded tissues) or bodily fluids (e.g., serum, plasma, urine, synovial fluid or spinal fluid) taken from an individual having such a disorder, relative to a “standard” gene expression level, i.e., the expression level in healthy tissue from an individual not having the disorder.

[0307] Thus, the invention provides a diagnostic method of a disorder, which involves: (a) assaying gene expression level in cells or body fluid of an individual; (b) comparing the gene expression level with a standard gene expression level, whereby an increase or decrease in the assayed gene expression level compared to the standard expression level is indicative of a disorder.

[0308] In the very least, the polynucleotides of the present invention can be used as molecular weight markers on Southern gels, as diagnostic probes for the presence of a specific mRNA in a particular cell type, as a probe to “subtract-out” known sequences in the process of discovering novel polynucleotides, for selecting and making oligomers for attachment to a “gene chip” or other support, to raise anti-DNA antibodies using DNA immunization techniques, and as an antigen to elicit an immune response.

[0309] Uses of the Polypeptides

[0310] Each of the polypeptides identified herein can be used in numerous ways. The following description should be considered exemplary and utilizes known techniques.

[0311] Polypeptides and antibodies directed to polypeptides of the present invention are useful to provide immunological probes for differential identification of the tissue(s) (e.g., immunohistochemistry assays such as, for example, ABC immunoperoxidase (Hsu et al., J. Histochem. Cytochem. 29:577-580 (1981)) or cell type(s) (e.g., immunocytochemistry assays).

[0312] Antibodies can be used to assay levels of polypeptides encoded by polynucleotides of the invention in a biological sample using classical immunohistological methods known to those of skill in the art (e.g., see Jalkanen, et al., J. Cell. Biol. 101:976-985 (1985); Jalkanen, et al., J. Cell. Biol. 105:3087-3096 (1987)). Other antibody-based methods useful for detecting protein gene expression include immunoassays, such as the enzyme linked immunosorbent assay (ELISA) and the radioimmunoassay (RIA). Suitable antibody assay labels are known in the art and include enzyme labels, such as, glucose oxidase; radioisotopes, such as iodine (¹³¹I, ¹²⁶I, ¹²³I, ¹²¹I), carbon (¹⁴C), sulfur (³⁵S), tritium (³H), indium (^{115m}In, ^{113m}In, ¹¹²In, ¹¹¹In), and technetium (⁹⁹Tc, ^{99m}Tc), thallium (²⁰¹Ti), gallium (⁶⁸Ga, ⁶⁷Ga), palladium (¹⁰³Pd), molybdenum (⁹⁹Mo), xenon (¹³³Xe), fluorine (¹⁸F), ¹⁵³Sm, ¹⁷⁷Lu ¹⁵⁹Gd, ¹⁴⁹Pm, ¹⁴⁰La, ¹⁷⁵Yb, ¹⁶⁶Ho, ⁹⁰Y, ⁴⁷Sc, ¹⁸⁶Re, ¹⁸⁸Re, ¹⁴²Pr, ¹⁰⁵Rh, ⁹⁷Ru; luminescent labels, such as luminol; and fluorescent labels, such as fluorescein and rhodamine, and biotin.

[0313] In addition to assaying levels of polypeptide of the present invention in a biological sample, proteins can also be detected in vivo by imaging. Antibody labels or markers for in vivo imaging of protein include those detectable by X-radiography, NMR or ESR. For X-radiography, suitable labels include radioisotopes such as barium or cesium, which emit detectable radiation but are not overtly harmful to the subject. Suitable markers for NMR and ESR include those with a detectable characteristic spin, such as deuterium, which may be incorporated into the antibody by labeling of nutrients for the relevant hybridoma.

[0314] A protein-specific antibody or antibody fragment which has been labeled with an appropriate detectable imaging moiety, such as a radioisotope (for example, ¹³¹I, ¹¹²In, ^{99m}Tc, (¹³¹I, ¹²⁵I, ¹²³I, ¹²¹I), carbon (¹⁴C), sulfur (³⁵S), tritium (³H), indium (^{115m}In, ^{113m}In, ¹¹²In, ¹¹¹In), and technetium (⁹⁹Tc, ^{99m}Tc), thallium (²⁰¹Ti), gallium (⁶⁸Ga, ⁶⁷Ga), palladium (¹⁰³Pd), molybdenum (⁹⁹Mo), xenon (¹³³Xe), fluorine (¹⁸F, ¹⁵³Sm, ¹⁷⁷Lu, ¹⁵⁹Gd, ¹⁴⁹Pm, ¹⁴⁰La, ¹⁷⁵Yb, ¹⁶⁶Ho, ⁹⁰Y, ⁴⁷Sc, ¹⁸⁶Re, ¹⁸⁸Re, ¹⁴²Pr, ¹⁰⁵Rh, ⁹⁷Ru), a radio-opaque substance, or a material detectable by nuclear magnetic resonance, is introduced (for example, parenterally, subcutaneously or intraperitoneally) into the mammal to be examined for immune system disorder. It will be understood in the art that the size of the subject and the imaging system used will determine the quantity of imaging moiety needed to produce diagnostic images. In the case of a radioisotope moiety, for a human subject, the quantity of radioactivity injected will normally range from about 5 to 20 millicuries of ^{99m}Tc. The labeled antibody or antibody fragment will then preferentially accumulate at the location of cells which express the polypeptide encoded by a polynucleotide of the invention. In vivo tumor imaging is described in S. W. Burchiel et al., “Immunopharmacokinetics of Radiolabeled Antibodies and Their Fragments” (Chapter 13 in Tumor Imaging: The Radiochemical Detection of Cancer, S. W. Burchiel and B. A. Rhodes, eds., Masson Publishing Inc. (1982)).

[0315] In one embodiment, the invention provides a method for the specific delivery of compositions of the invention to cells by administering polypeptides of the invention (e.g., polypeptides encoded by polynucleotides of the invention and/or antibodies) that are associated with heterologous polypeptides or nucleic acids. In one example, the invention provides a method for delivering a therapeutic protein into the targeted cell. In another example, the invention provides a method for delivering a single stranded nucleic acid (e.g., antisense or ribozymes) or double stranded nucleic acid (e.g., DNA that can integrate into the cell's genome or replicate episomally and that can be transcribed) into the targeted cell.

[0316] In another embodiment, the invention provides a method for the specific destruction of cells (e.g., the destruction of tumor cells) by administering polypeptides of the invention in association with toxins or cytotoxic prodrugs.

[0317] In a preferred embodiment, the invention provides a method for the specific destruction of colorectal cells (e.g., aberrant colorectal cells, colorectal neoplasm) by administering polypeptides of the invention (e.g., polypeptides encoded by polynucleotides of the invention and/or antibodies) in association with toxins or cytotoxic prodrugs.

[0318] By “toxin” is meant one or more compounds that bind and activate endogenous cytotoxic effector systems, radioisotopes, holotoxins, modified toxins, catalytic subunits of toxins, or any molecules or enzymes not normally present in or on the surface of a cell that under defined conditions cause the cell's death. Toxins that may be used according to the methods of the invention include, but are not limited to, radioisotopes known in the art, compounds such as, for example, antibodies (or complement fixing containing portions thereof) that bind an inherent or induced endogenous cytotoxic effector system, thymidine kinase, endonuclease, RNAse, alpha toxin, ricin, abrin, Pseudomonas exotoxin A, diphtheria toxin, saporin, momordin, gelonin, pokeweed antiviral protein, alpha-sarcin and cholera toxin. “Toxin” also includes a cytostatic or cytocidal agent, a therapeutic agent or a radioactive metal ion, e.g., alpha-emitters such as, for example, ²¹³Bi, or other radioisotopes such as, for example, ¹⁰³Pd, ¹³³Xe, ¹³¹I, ⁶⁸Ge, ⁵⁷Co, ⁶⁵Zn, ⁸⁵Sr, ³²P, ³⁵S, ⁹⁰Y, ¹⁵³Sm, ¹⁵³Gd, ¹⁶⁹Yb, ⁵¹Cr, ⁵⁴Mn, ⁷⁵Se, ¹¹³Sn, ⁹⁰Yttrium, ¹¹⁷Tin, ¹⁸⁶Rhenium, Holmium, and ¹⁸⁸Rhenium; luminescent labels, such as luminol; and fluorescent labels, such as fluorescein and rhodamine, and biotin.

[0319] Techniques known in the art may be applied to label polypeptides of the invention (including antibodies). Such techniques include, but are not limited to, the use of bifunctional conjugating agents (see e.g., U.S. Pat. Nos. 5,756,065; 5,714,631; 5,696,239; 5,652,361; 5,505,931; 5,489,425; 5,435,990; 5,428,139; 5,342,604; 5,274,119; 4,994,560; and 5,808,003; the contents of each of which are hereby incorporated by reference in its entirety).

[0320] Thus, the invention provides a diagnostic method of a disorder, which involves (a) assaying the expression level of a colorectal cancer polypeptide of the present invention in cells or body fluid of an individual, or more preferrably, assaying the expression level of a colorectal cancer polypeptide of the present invention in colon cells or sera of an individual; and (b) comparing the assayed polypeptide expression level with a standard polypeptide expression level, whereby an increase or decrease in the assayed polypeptide expression level compared to the standard expression level is indicative of a disorder. With respect to cancer, the presence of a relatively high amount of transcript in biopsied tissue from an individual may indicate a predisposition for the development of the disease, or may provide a means for detecting the disease prior to the appearance of actual clinical symptoms. A more definitive diagnosis of this type may allow health professionals to employ preventative measures or aggressive treatment earlier thereby preventing the development or further progression of the cancer.

[0321] Moreover, colorectal cancer antigen polypeptides of the present invention can be used to treat or prevent diseases or conditions such as, for example, neural disorders, immune system disorders, muscular disorders, reproductive disorders, gastrointestinal disorders, pulmonary disorders, cardiovascular disorders, renal disorders, proliferative disorders, and/or cancerous diseases and conditions, preferably proliferative disorders of the colon, and/or cancerous disease and conditions. For example, patients can be administered a polypeptide of the present invention in an effort to replace absent or decreased levels of the polypeptide (e.g., insulin), to supplement absent or decreased levels of a different polypeptide (e.g., hemoglobin S for hemoglobin B, SOD, catalase, DNA repair proteins), to inhibit the activity of a polypeptide (e.g., an oncogene or tumor supressor), to activate the activity of a polypeptide (e.g., by binding to a receptor), to reduce the activity of a membrane bound receptor by competing with it for free ligand (e.g., soluble TNF receptors used in reducing inflammation), or to bring about a desired response (e.g., blood vessel growth inhibition, enhancement of the immune response to proliferative cells or tissues).

[0322] Similarly, antibodies directed to a polypeptide of the present invention can also be used to treat disease (as described supra, and elsewhere herein). For example, administration of an antibody directed to a polypeptide of the present invention can bind, and/or neutralize the polypeptide, and/or reduce overproduction of the polypeptide. Similarly, administration of an antibody can activate the polypeptide, such as by binding to a polypeptide bound to a membrane (receptor).

[0323] At the very least, the polypeptides of the present invention can be used as molecular weight markers on SDS-PAGE gels or on molecular sieve gel filtration columns using methods well known to those of skill in the art. Polypeptides can also be used to raise antibodies, which in turn are used to measure protein expression from a recombinant cell, as a way of assessing transformation of the host cell. Moreover, the polypeptides of the present invention can be used to test the following biological activities.

[0324] Diagnostic Asssays

[0325] The compounds of the present invention are useful for diagnosis, treatment, prevention and/or prognosis of various colorectal related disorders in mammals, preferably humans. Such disorders include, but are not limited to, colon cancer, adenomatous colon polyps (e.g., villous adenoma), colon carcinoma, colorectal cancer, and/or as described under “Gastrointestinal Disorders” below.

[0326] Colorectal cancer antigens are expressed in the colon and/or rectum. For a number of colorectal-related disorders, substantially altered (increased or decreased) levels of colorectal cancer antigen gene expression can be detected in colorectal tissue or other cells or bodily fluids (e.g., sera, plasma, urine, semen, synovial fluid or spinal fluid) taken from an individual having such a disorder, relative to a “standard” colorectal cancer antigen gene expression level, that is, the colorectal cancer antigen expression level in colorectal tissues or bodily fluids from an individual not having the colorectal disorder. Thus, the invention provides a diagnostic method useful during diagnosis of a colorectal disorder, which involves measuring the expression level of the gene encoding the colorectal cancer associated polypeptide in colorectal tissue or other cells or body fluid from an individual and comparing the measured gene expression level with a standard colorectal cancer antigens gene expression level, whereby an increase or decrease in the gene expression level(s) compared to the standard is indicative of an colorectal disorder.

[0327] In specific embodiments, the invention provides a diagnostic method useful during diagnosis of a disorder of a normal or diseased tissue/cell source, which involves measuring the expression level of the coding sequence of a polynucleotide sequence associated with this tissue/cell source as disclosed by Tables 1 and 5 in the tissue/cell source or other cells or body fluid from an individual and comparing the expression level of the coding sequence with a standard expression level of the coding sequence of a polynucleotide sequence, whereby an increase or decrease in the gene expression level(s) compared to the standard is indicative of a disorder of a normal or diseased tissue/cell source.

[0328] In particular, it is believed that certain tissues in mammals with cancer of cells or tissue of the colon and/or rectum express significantly enhanced or reduced levels of normal or altered colorectal cancer antigen expression and mRNA encoding the colorectal cancer associated polypeptide when compared to a corresponding “standard” level. Further, it is believed that enhanced or depressed levels of the colorectal cancer associated polypeptide can be detected in certain body fluids (e.g., sera, plasma, urine, and spinal fluid) or cells or tissue from mammals with such a cancer when compared to sera from mammals of the same species not having the cancer.

[0329] For example, as disclosed herein, colorectal cancer associated polypeptides of the invention are expressed in the colon and/or rectum. Accordingly, polynucleotides of the invention (e.g., polynucleotide sequences complementary to all or a portion of a colorectal cancer antigen mRNA nucleotide sequence of SEQ ID NO:X, the nucleotide coding sequence of the related cDNA contained in a deposited library, a nucleotide sequence encoding SEQ ID NO:Y, a nucleotide sequence encoding a polypeptide encoded by SEQ ID NO:X, the nucleotide sequence encoding the polypeptide encoded by the cDNA in the related cDNA contained in a deposited library, polynucleotide fragments of any of these nucleic acid molecules (e.g., those fragments described herein), and/or antibodies (and antibody fragments) directed against the polypeptides of the invention may be used to quantitate or qualitate concentrations of cells of the colon and/or rectum expressing colorectal cancer antigens, preferrably on their cell surfaces. These polynucleotides and antibodies additionally have diagnostic applications in detecting abnormalities in the level of colorectal cancer antigens gene expression, or abnormalities in the structure and/or temporal, tissue, cellular, or subcellular location of colorectal cancer antigens. These diagnostic assays may be performed in vivo or in vitro, such as, for example, on blood samples, biopsy tissue or autopsy tissue.

[0330] Thus, the invention provides a diagnostic method useful during diagnosis of a colorectal disorder, including cancers, which involves measuring the expression level of the gene encoding the colorectal cancer antigen polypeptide in colon and/or rectal tissue or other cells or body fluid from an individual and comparing the measured gene expression level with a standard colorectal cancer antigen gene expression level, whereby an increase or decrease in the gene expression level compared to the standard is indicative of a colorectal disorder.

[0331] Where a diagnosis of a disorder in the colon and/or rectum, including diagnosis of a tumor, has already been made according to conventional methods, the present invention is useful as a prognostic indicator, whereby patients exhibiting enhanced or depressed colorectal cancer antigen gene expression will experience a worse clinical outcome relative to patients expressing the gene at a level nearer the standard level.

[0332] By “assaying the expression level of the gene encoding the colorectal cancer associated polypeptide” is intended qualitatively or quantitatively measuring or estimating the level of the colorectal cancer antigen polypeptide or the level of the mRNA encoding the colorectal cancer antigen polypeptide in a first biological sample either directly (e.g., by determining or estimating absolute protein level or mRNA level) or relatively (e.g., by comparing to the colorectal cancer associated polypeptide level or mRNA level in a second biological sample). Preferably, the colorectal cancer antigen polypeptide expression level or mRNA level in the first biological sample is measured or estimated and compared to a standard colorectal cancer antigen polypeptide level or mRNA level, the standard being taken from a second biological sample obtained from an individual not having the disorder or being determined by averaging levels from a population of individuals not having a disorder of the colon and/or rectum. As will be appreciated in the art, once a standard colorectal cancer antigen polypeptide level or mRNA level is known, it can be used repeatedly as a standard for comparison.

[0333] By “biological sample” is intended any biological sample obtained from an individual, cell line, tissue culture, or other source containing colorectal cancer antigen polypeptides (including portions thereof) or mRNA. As indicated, biological samples include body fluids (such as sera, plasma, urine, synovial fluid and spinal fluid) which contain cells expressing colorectal cancer antigen polypeptides, colon and/or rectal tissue, and other tissue sources found to express the full length or fragments thereof of a colorectal cancer antigen. Methods for obtaining tissue biopsies and body fluids from mammals are well known in the art. Where the biological sample is to include mRNA, a tissue biopsy is the preferred source.

[0334] Total cellular RNA can be isolated from a biological sample using any suitable technique such as the single-step guanidinium-thiocyanate-phenol-chloroform method described in Chomczynski and Sacchi, Anal. Biochem. 162:156-159 (1987). Levels of mRNA encoding the colorectal cancer antigen polypeptides are then assayed using any appropriate method. These include Northern blot analysis, S1 nuclease mapping, the polymerase chain reaction (PCR), reverse transcription in combination with the polymerase chain reaction (RT-PCR), and reverse transcription in combination with the ligase chain reaction (RT-LCR).

[0335] The present invention also relates to diagnostic assays such as quantitative and diagnostic assays for detecting levels of colorectal cancer antigen polypeptides, in a biological sample (e.g., cells and tissues), including determination of normal and abnormal levels of polypeptides. Thus, for instance, a diagnostic assay in accordance with the invention for detecting over-expression of colorectal cancer antigens compared to normal control tissue samples may be used to detect the presence of tumors. Assay techniques that can be used to determine levels of a polypeptide, such as a colorectal cancer antigen polypeptide of the present invention in a sample derived from a host are well-known to those of skill in the art. Such assay methods include radioimmunoassays, competitive-binding assays, Western Blot analysis and ELISA assays. Assaying colorectal cancer antigen polypeptide levels in a biological sample can occur using any art-known method.

[0336] Assaying colorectal cancer antigen polypeptide levels in a biological sample can occur using antibody-based techniques. For example, colorectal cancer antigen polypeptide expression in tissues can be studied with classical immunohistological methods (Jalkanen et al., J. Cell. Biol. 101:976-985 (1985); Jalkanen, M., et al., J. Cell . Biol. 105:3087-3096 (1987)). Other antibody-based methods useful for detecting colorectal cancer antigen polypeptide gene expression include immunoassays, such as the enzyme linked immunosorbent assay (ELISA) and the radioimmunoassay (RIA). Suitable antibody assay labels are known in the art and include enzyme labels, such as, glucose oxidase, and radioisotopes, such as iodine (¹²⁵I, ¹²¹I), carbon (¹⁴C), sulfur (35S), tritium (3H), indium (¹¹²In), and technetium (^{99m}Tc), and fluorescent labels, such as fluorescein and rhodamine, and biotin.

[0337] The tissue or cell type to be analyzed will generally include those which are known, or suspected, to express the colorectal cancer antigen gene (such as, for example, cells of the colon and/or rectum and/or colorectal cancers). The protein isolation methods employed herein may, for example, be such as those described in Harlow and Lane (Harlow, E. and Lane, D., 1988, “Antibodies: A Laboratory Manual”, Cold Spring Harbor Laboratory Press, Cold Spring Harbor, New York), which is incorporated herein by reference in its entirety. The isolated cells can be derived from cell culture or from a patient. The analysis of cells taken from culture may be a necessary step in the assessment of cells that could be used as part of a cell-based gene therapy technique or, alternatively, to test the effect of compounds on the expression of the colorectal cancer antigen gene.

[0338] For example, antibodies, or fragments of antibodies, such as those described herein, may be used to quantitatively or qualitatively detect the presence of colorectal cancer antigen gene products or conserved variants or peptide fragments thereof. This can be accomplished, for example, by immunofluorescence techniques employing a fluorescently labeled antibody coupled with light microscopic, flow cytometric, or fluorimetric detection.

[0339] In a preferred embodiment, antibodies, or fragments of antibodies directed to any one or all of the predicted epitope domains of the colorectal cancer antigen polypeptides (Shown in Table 4) may be used to quantitatively or qualitatively detect the presence of colorectal cancer antigen gene products or conserved variants or peptide fragments thereof. This can be accomplished, for example, by immunofluorescence techniques employing a fluorescently labeled antibody coupled with light microscopic, flow cytometric, or fluorimetric detection.

[0340] In an additional preferred embodiment, antibodies, or fragments of antibodies directed to a conformational epitope of a colorectal cancer antigen may be used to quantitatively or qualitatively detect the presence of colorectal cancer antigen gene products or conserved variants or peptide fragments thereof. This can be accomplished, for example, by immunofluorescence techniques employing a fluorescently labeled antibody coupled with light microscopic, flow cytometric, or fluorimetric detection.

[0341] The antibodies (or fragments thereof), and/or colorectal cancer antigen polypeptides of the present invention may, additionally, be employed histologically, as in immunofluorescence, immunoelectron microscopy or non-immunological assays, for in situ detection of colorectal cancer antigen gene products or conserved variants or peptide fragments thereof. In situ detection may be accomplished by removing a histological specimen from a patient, and applying thereto a labeled antibody or colorectal cancer antigen polypeptide of the present invention. The antibody (or fragment thereof) or colorectal cancer antigen polypeptide is preferably applied by overlaying the labeled antibody (or fragment) onto a biological sample. Through the use of such a procedure, it is possible to determine not only the presence of the colorectal cancer antigen gene product, or conserved variants or peptide fragments, or colorectal cancer antigen polypeptide binding, but also its distribution in the examined tissue. Using the present invention, those of ordinary skill will readily perceive that any of a wide variety of histological methods (such as staining procedures) can be modified in order to achieve such in situ detection.

[0342] Immunoassays and non-immunoassays for colorectal cancer antigen gene products or conserved variants or peptide fragments thereof will typically comprise incubating a sample, such as a biological fluid, a tissue extract, freshly harvested cells, or lysates of cells which have been incubated in cell culture, in the presence of a detectably labeled antibody capable of binding colorectal cancer antigen gene products or conserved variants or peptide fragments thereof, and detecting the bound antibody by any of a number of techniques well-known in the art.

[0343] The biological sample may be brought in contact with and immobilized onto a solid phase support or carrier such as nitrocellulose, or other solid support which is capable of immobilizing cells, cell particles or soluble proteins. The support may then be washed with suitable buffers followed by treatment with the detectably labeled anti-colorectal cancer antigen antibody or detectable colorectal cancer antigen polypeptide. The solid phase support may then be washed with the buffer a second time to remove unbound antibody or polypeptide. Optionally the antibody is subsequently labeled. The amount of bound label on solid support may then be detected by conventional means.

[0344] By “solid phase support or carrier” is intended any support capable of binding an antigen or an antibody. Well-known supports or carriers include glass, polystyrene, polypropylene, polyethylene, dextran, nylon, amylases, natural and modified celluloses, polyacrylamides, gabbros, and magnetite. The nature of the carrier can be either soluble to some extent or insoluble for the purposes of the present invention. The support material may have virtually any possible structural configuration so long as the coupled molecule is capable of binding to an antigen or antibody. Thus, the support configuration may be spherical, as in a bead, or cylindrical, as in the inside surface of a test tube, or the external surface of a rod. Alternatively, the surface may be flat such as a sheet, test strip, etc. Preferred supports include polystyrene beads. Those skilled in the art will know many other suitable carriers for binding antibody or antigen, or will be able to ascertain the same by use of routine experimentation.

[0345] The binding activity of a given lot of anti-colorectal cancer antigen antibody or colorectal cancer antigen polypeptide may be determined according to well known methods. Those skilled in the art will be able to determine operative and optimal assay conditions for each determination by employing routine experimentation.

[0346] In addition to assaying colorectal cancer antigen polypeptide levels or polynucleotide levels in a biological sample obtained from an individual, colorectal cancer antigen polypeptide or polynucleotide can also be detected in vivo by imaging. For example, in one embodiment of the invention, colorectal cancer antigen polypeptide and/or anti-colorectal cancer antigen antibodies are used to image colon and/or rectal diseased cells, such as neoplasms. In another embodiment, colorectal cancer antigen polynucleotides of the invention (e.g., polynucleotides complementary to all or a portion of colorectal cancer antigen mRNA) and/or anti-colorectal cancer antigen antibodies (e.g., antibodies directed to any one or a combination of the epitopes of colorectal cancer antigens, antibodies directed to a conformational epitope of colorectal cancer antigens, antibodies directed to the full length polypeptide expressed on the cell surface of a mammalian cell) are used to image diseased or neoplastic cells of the colon and/or rectum.

[0347] Antibody labels or markers for in vivo imaging of colorectal cancer antigen polypeptides include those detectable by X-radiography, NMR, MRI, CAT-scans or ESR. For X-radiography, suitable labels include radioisotopes such as barium or cesium, which emit detectable radiation but are not overtly harmful to the subject. Suitable markers for NMR and ESR include those with a detectable characteristic spin, such as deuterium, which may be incorporated into the antibody by labeling of nutrients for the relevant hybridoma. Where in vivo imaging is used to detect enhanced levels of colorectal cancer antigen polypeptides for diagnosis in humans, it may be preferable to use human antibodies or “humanized” chimeric monoclonal antibodies. Such antibodies can be produced using techniques described herein or otherwise known in the art. For example methods for producing chimeric antibodies are known in the art. See, for review, Morrison, Science 229:1202 (1985); Oi et al., BioTechniques 4:214 (1986); Cabilly et al., U.S. Pat. No. 4,816,567; Taniguchi et al., EP 171496; Morrison et al., EP 173494; Neuberger et al., WO 8601533; Robinson et al., WO 8702671; Boulianne et al., Nature 312:643 (1984); Neuberger et al., Nature 314:268 (1985).

[0348] Additionally, any colorectal cancer antigen polypeptides whose presence can be detected, can be administered. For example, colorectal cancer antigen polypeptides labeled with a radio-opaque or other appropriate compound can be administered and visualized in vivo, as discussed, above for labeled antibodies. Further such colorectal cancer antigen polypeptides can be utilized for in vitro diagnostic procedures.

[0349] A colorectal cancer antigen polypeptide-specific antibody or antibody fragment which has been labeled with an appropriate detectable imaging moiety, such as a radioisotope (for example, ¹³¹I, ¹¹²In, ^{99m}Tc), a radio-opaque substance, or a material detectable by nuclear magnetic resonance, is introduced (for example, parenterally, subcutaneously or intraperitoneally) into the mammal to be examined for a colorectal disorder. It will be understood in the art that the size of the subject and the imaging system used will determine the quantity of imaging moiety needed to produce diagnostic images. In the case of a radioisotope moiety, for a human subject, the quantity of radioactivity injected will normally range from about 5 to 20 millicuries of ^{99m}Tc. The labeled antibody or antibody fragment will then preferentially accumulate at the location of cells which contain colorectal cancer antigen protein. In vivo tumor imaging is described in S. W. Burchiel et al., “Immunopharmacokinetics of Radiolabeled Antibodies and Their Fragments” (Chapter 13 in Tumor Imaging: The Radiochemical Detection of Cancer, S. W. Burchiel and B. A. Rhodes, eds., Masson Publishing Inc. (1982)).

[0350] With respect to antibodies, one of the ways in which the anti-colorectal cancer antigen antibody can be detectably labeled is by linking the same to an enzyme and using the linked product in an enzyme immunoassay (EIA) (Voller, A., “The Enzyme Linked Immunosorbent Assay (ELISA)”, 1978, Diagnostic Horizons 2:1-7, Microbiological Associates Quarterly Publication, Walkersville, Md.); Voller et al., J. Clin. Pathol. 31:507-520 (1978); Butler, J. E., Meth. Enzymol. 73:482-523 (1981); Maggio, E. (ed.), 1980, Enzyme Immunoassay, CRC Press, Boca Raton, Fla.,; Ishikawa, E. et al., (eds.), 1981, Enzyme Immunoassay, Kgaku Shoin, Tokyo). The enzyme, which is bound to the antibody will react with an appropriate substrate, preferably a chromogenic substrate, in such a manner as to produce a chemical moiety which can be detected, for example, by spectrophotometric, fluorimetric or by visual means. Enzymes which can be used to detectably label the antibody include, but are not limited to, malate dehydrogenase, staphylococcal nuclease, delta-5-steroid isomerase, yeast alcohol dehydrogenase, alpha-glycerophosphate, dehydrogenase, triose phosphate isomerase, horseradish peroxidase, alkaline phosphatase, asparaginase, glucose oxidase, beta-galactosidase, ribonuclease, urease, catalase, glucose-6-phosphate dehydrogenase, glucoamylase and acetylcholinesterase. Additionally, the detection can be accomplished by calorimetric methods which employ a chromogenic substrate for the enzyme. Detection may also be accomplished by visual comparison of the extent of enzymatic reaction of a substrate in comparison with similarly prepared standards.

[0351] Detection may also be accomplished using any of a variety of other immunoassays. For example, by radioactively labeling the antibodies or antibody fragments, it is possible to detect colorectal cancer antigens through the use of a radioimmunoassay (RIA) (see, for example, Weintraub, B., Principles of Radioimmunoassays, Seventh Training Course on Radioligand Assay Techniques, The Endocrine Society, March, 1986, which is incorporated by reference herein). The radioactive isotope can be detected by means including, but not limited to, a gamma counter, a scintillation counter, or autoradiography.

[0352] It is also possible to label the antibody with a fluorescent compound. When the fluorescently labeled antibody is exposed to light of the proper wave length, its presence can then be detected due to fluorescence. Among the most commonly used fluorescent labeling compounds are fluorescein isothiocyanate, rhodamine, phycoerythrin, phycocyanin, allophycocyanin, ophthaldehyde and fluorescamine.

[0353] The antibody can also be detectably labeled using fluorescence emitting metals such as ¹⁵²Eu, or others of the lanthanide series. These metals can be attached to the antibody using such metal chelating groups as diethylenetriaminepentacetic acid (DTPA) or ethylenediaminetetraacetic acid (EDTA).

[0354] The antibody also can be detectably labeled by coupling it to a chemiluminescent compound. The presence of the chemiluminescent-tagged antibody is then determined by detecting the presence of luminescence that arises during the course of a chemical reaction. Examples of particularly useful chemiluminescent labeling compounds are luminol, isoluminol, theromatic acridinium ester, imidazole, acridinium salt and oxalate ester.

[0355] Likewise, a bioluminescent compound may be used to label the antibody of the present invention. Bioluminescence is a type of chemiluminescence found in biological systems in, which a catalytic protein increases the efficiency of the chemiluminescent reaction. The presence of a bioluminescent protein is determined by detecting the presence of luminescence. Important bioluminescent compounds for purposes of labeling are luciferin, luciferase and aequorin.

[0356] Methods for Detecting Colorectal Disease, Including Cancer

[0357] In general, a colorectal disease or cancer may be detected in a patient based on the presence of one or more colorectal cancer antigen proteins of the invention and/or polynucleotides encoding such proteins in a biological sample (for example, blood, sera, urine, and/or tumor biopsies) obtained from the patient. In other words, such proteins and/or polynucleotides may be used as markers to indicate the presence or absence of a colorectal disease or disorder, including cancer. Cancers that may be diagnosed, and/or prognosed using the compositions of the invention include but are not limited to, colorectal cancer. The binding agents provided herein generally permit detection of the level of antigen that binds to the agent in the biological sample. Polynucleotide primers and probes may be used to detect the level of mRNA encoding colorectal cancer antigen polypeptides, which is also indicative of the presence or absence of a colorectal disease or disorder, including cancer. In general, colorectal cancer antigen polypeptides should be present at a level that is at least three fold higher in diseased tissue than in normal tissue.

[0358] There are a variety of assay formats known to those of ordinary skill in the art for using a binding agent to detect polypeptide markers in a sample. See, e.g., Harlow and Lane, supra. In general, the presence or absence of a colorectal disease in a patient may be determined by (a) contacting a biological sample obtained from a patient with a binding agent; (b) detecting in the sample a level of polypeptide that binds to the binding agent; and (c) comparing the level of polypeptide with a predetermined cut-off value.

[0359] In a preferred embodiment, the assay involves the use of binding agent immobilized on a solid support to bind to and remove the colorectal cancer antigen polypeptide of the invention from the remainder of the sample. The bound polypeptide may then be detected using a detection reagent that contains a reporter group and specifically binds to the binding agent/polypeptide complex. Such detection reagents may comprise, for example, a binding agent that specifically binds to the polypeptide or an antibody or other agent that specifically binds to the binding agent, such as an anti-immunoglobulin, protein G, protein A or a lectin. Alternatively, a competitive assay may be utilized, in which a polypeptide is labeled with a reporter group and allowed to bind to the immobilized binding agent after incubation of the binding agent with the sample. The extent to which components of the sample inhibit the binding of the labeled polypeptide to the binding agent is indicative of the reactivity of the sample with the immobilized binding agent. Suitable polypeptides for use within such assays include colorectal cancer antigen polypeptides and portions thereof, or antibodies, to which the binding agent binds, as described above.

[0360] The solid support may be any material known to those of skill in the art to which colorectal cancer antigen polypeptides of the invention may be attached. For example, the solid support may be a test well in a microtiter plate or a nitrocellulose or other suitable membrane. Alternatively, the support may be a bead or disc, such as glass fiberglass, latex or a plastic material such as polystyrene or polyvinylchloride. The support may also be a magnetic particle or a fiber optic sensor, such as those disclosed, for example, in U.S. Pat. No. 5,359,681. The binding agent may be immobilized on the solid support using a variety of techniques known to those of skill in the art, which are amply described in the patent and scientific literature. In the context of the present invention, the term “immobilization” refers to both noncovalent association, such as adsorption, and covalent attachment (which may be a direct linkage between the agent and functional groups on the support or may be a linkage by way of a cross-linking agent). Immobilization by adsorption to a well in a microtiter plate or to a membrane is preferred. In such cases, adsorption may be achieved by contacting the binding agent, in a suitable buffer, with the solid support for the suitable amount of time. The contact time varies with temperature, but is typically between about 1 hour and about 1 day. In general, contacting a well of plastic microtiter plate (such as polystyrene or polyvinylchloride) with an amount of binding agent ranging from about 10 ng to about 10 ug, and preferably about 100 ng to about 1 ug, is sufficient to immobilize an adequate amount of binding agent.

[0361] Covalent attachment of binding agent to a solid support may generally be achieved by first reacting the support with a bifunctional reagent that will react with both the support and a functional group, such as a hydroxyl or amino group, on the binding agent. For example, the binding agent may be covalently attached to supports having an appropriate polymer coating using benzoquinone or by condensation of an aldehyde group on the support with an amine and an active hydrogen on the binding partner (see, e.g., Pierce Immunotechnology Catalog and Handbook, 1991, at A12-A13).

[0362] Gene Therapy Methods

[0363] Another aspect of the present invention is to gene therapy methods for treating or preventing disorders, diseases and conditions. The gene therapy methods relate to the introduction of nucleic acid (DNA, RNA and antisense DNA or RNA) sequences into an animal to achieve expression of the polypeptide of the present invention. This method requires a polynucleotide which codes for a polypeptide of the present invention operatively linked to a promoter and any other genetic elements necessary for the expression of the polypeptide by the target tissue. Such gene therapy and delivery techniques are known in the art, see, for example, WO90/11092, which is herein incorporated by reference.

[0364] Thus, for example, cells from a patient may be engineered with a polynucleotide (DNA or RNA) comprising a promoter operably linked to a polynucleotide of the present invention ex vivo, with the engineered cells then being provided to a patient to be treated with the polypeptide of the present invention. Such methods are well-known in the art. For example, see Belldegrun, A., et al., J. Natl. Cancer Inst. 85: 207-216 (1993); Ferrantini, M. et al., Cancer Research 53: 1107-1112 (1993); Ferrantini, M. et al., J. Immunology 153: 4604-4615 (1994); Kaido, T., et al., Int. J. Cancer 60: 221-229 (1995); Ogura, H., et al., Cancer Research 50: 5102-5106 (1990); Santodonato, L., et al., Human Gene Therapy 7:1-10 (1996); Santodonato, L., et al., Gene Therapy 4:1246-1255 (1997); and Zhang, J.-F. et al., Cancer Gene Therapy 3: 31-38 (1996)), which are herein incorporated by reference. In one embodiment, the cells which are engineered are arterial cells. The arterial cells may be reintroduced into the patient through direct injection to the artery, the tissues surrounding the artery, or through catheter injection.

[0365] As discussed in more detail below, the polynucleotide constructs can be delivered by any method that delivers injectable materials to the cells of an animal, such as, injection into the interstitial space of tissues (heart, muscle, skin, lung, liver, and the like). The polynucleotide constructs may be delivered in a pharmaceutically acceptable liquid or aqueous carrier.

[0366] In one embodiment, the polynucleotide of the present invention is delivered as a naked polynucleotide. The term “naked” polynucleotide, DNA or RNA refers to sequences that are free from any delivery vehicle that acts to assist, promote or facilitate entry into the cell, including viral sequences, viral particles, liposome formulations, lipofectin or precipitating agents and the like. However, the polynucleotide of the present invention can also be delivered in liposome formulations and lipofectin formulations and the like can be prepared by methods well known to those skilled in the art. Such methods are described, for example, in U.S. Pat. Nos. 5,593,972, 5,589,466, and 5,580,859, which are herein incorporated by reference.

[0367] The polynucleotide vector constructs used in the gene therapy method are preferably constructs that will not integrate into the host genome nor will they contain sequences that allow for replication. Appropriate vectors include pWLNEO, pSV2CAT, pOG44, pXT1 and pSG available from Stratagene; pSVK3, pBPV, pMSG and pSVL available from Pharmacia; and pEF1/V5, pcDNA3.1, and pRc/CMV2 available from Invitrogen. Other suitable vectors will be readily apparent to the skilled artisan.

[0368] Any strong promoter known to those skilled in the art can be used for driving the expression of the polynucleotide sequence. Suitable promoters include adenoviral promoters, such as the adenoviral major late promoter; or heterologous promoters, such as the cytomegalovirus (CMV) promoter; the respiratory syncytial virus (RSV) promoter; inducible promoters, such as the MMT promoter, the metallothionein promoter; heat shock promoters; the albumin promoter; the ApoAI promoter; human globin promoters; viral thymidine kinase promoters, such as the Herpes Simplex thymidine kinase promoter; retroviral LTRs; the b-actin promoter; and human growth hormone promoters. The promoter also may be the native promoter for the polynucleotide of the present invention.

[0369] Unlike other gene therapy techniques, one major advantage of introducing naked nucleic acid sequences into target cells is the transitory nature of the polynucleotide synthesis in the cells. Studies have shown that non-replicating DNA sequences can be introduced into cells to provide production of the desired polypeptide for periods of up to six months.

[0370] The polynucleotide construct can be delivered to the interstitial space of tissues within the an animal, including of muscle, skin, brain, lung, liver, spleen, bone marrow, thymus, heart, lymph, blood, bone, cartilage, pancreas, kidney, gall bladder, stomach, intestine, testis, ovary, uterus, rectum, nervous system, eye, gland, and connective tissue. Interstitial space of the tissues comprises the intercellular, fluid, mucopolysaccharide matrix among the reticular fibers of organ tissues, elastic fibers in the walls of vessels or chambers, collagen fibers of fibrous tissues, or that same matrix within connective tissue ensheathing muscle cells or in the lacunae of bone. It is similarly the space occupied by the plasma of the circulation and the lymph fluid of the lymphatic channels. Delivery to the interstitial space of muscle tissue is preferred for the reasons discussed below. They may be conveniently delivered by injection into the tissues comprising these cells. They are preferably delivered to and expressed in persistent, non-dividing cells which are differentiated, although delivery and expression may be achieved in non-differentiated or less completely differentiated cells, such as, for example, stem cells of blood or skin fibroblasts. In vivo muscle cells are particularly competent in their ability to take up and express polynucleotides.

[0371] For the naked nucleic acid sequence injection, an effective dosage amount of DNA or RNA will be in the range of from about 0.05 mg/kg body weight to about 50 mg/kg body weight. Preferably the dosage will be from about 0.005 mg/kg to about 20 mg/kg and more preferably from about 0.05 mg/kg to about 5 mg/kg. Of course, as the artisan of ordinary skill will appreciate, this dosage will vary according to the tissue site of injection. The appropriate and effective dosage of nucleic acid sequence can readily be determined by those of ordinary skill in the art and may depend on the condition being treated and the route of administration.

[0372] The preferred route of administration is by the parenteral route of injection into the interstitial space of tissues. However, other parenteral routes may also be used, such as, inhalation of an aerosol formulation particularly for delivery to lungs or bronchial tissues, throat or mucous membranes of the nose. In addition, naked DNA constructs can be delivered to arteries during angioplasty by the catheter used in the procedure.

[0373] The naked polynucleotides are delivered by any method known in the art, including, but not limited to, direct needle injection at the delivery site, intravenous injection, topical administration, catheter infusion, and so-called “gene guns”. These delivery methods are known in the art.

[0374] The constructs may also be delivered with delivery vehicles such as viral sequences, viral particles, liposome formulations, lipofectin, precipitating agents, etc. Such methods of delivery are known in the art.

[0375] In certain embodiments, the polynucleotide constructs are complexed in a liposome preparation. Liposomal preparations for use in the instant invention include cationic (positively charged), anionic (negatively charged) and neutral preparations. However, cationic liposomes are particularly preferred because a tight charge complex can be formed between the cationic liposome and the polyanionic nucleic acid. Cationic liposomes have been shown to mediate intracellular delivery of plasmid DNA (Felgner et al., Proc. Natl. Acad. Sci. USA (1987) 84:7413-7416, which is herein incorporated by reference); mRNA (Malone et al., Proc. Natl. Acad. Sci. USA (1989) 86:6077-6081, which is herein incorporated by reference); and purified transcription factors (Debs et al., J. Biol. Chem. (1990) 265:10189-10192, which is herein incorporated by reference), in functional form.

[0376] Cationic liposomes are readily available. For example, N[1-2,3-dioleyloxy)propyl]-N,N,N-triethylammonium (DOTMA) liposomes are particularly useful and are available under the trademark Lipofectin, from GIBCO BRL, Grand Island, N.Y. (See, also, Felgner et al., Proc. Natl Acad. Sci. USA (1987) 84:7413-7416, which is herein incorporated by reference). Other commercially available liposomes include transfectace (DDAB/DOPE) and DOTAP/DOPE (Boehringer).

[0377] Other cationic liposomes can be prepared from readily available materials using techniques well known in the art. See, e.g. PCT Publication No. WO 90/11092 (which is herein incorporated by reference) for a description of the synthesis of DOTAP (1,2-bis(oleoyloxy)-3-(trimethylammonio)propane) liposomes. Preparation of DOTMA liposomes is explained in the literature, see, e.g., P. Felgner et al., Proc. Natl. Acad. Sci. USA 84:7413-7417, which is herein incorporated by reference. Similar methods can be used to prepare liposomes from other cationic lipid materials.

[0378] Similarly, anionic and neutral liposomes are readily available, such as from Avanti Polar Lipids (Birmingham, Ala.), or can be easily prepared using readily available materials. Such materials include phosphatidyl, choline, cholesterol, phosphatidyl ethanolamine, dioleoylphosphatidyl choline (DOPC), dioleoylphosphatidyl glycerol (DOPG), dioleoylphoshatidyl ethanolamine (DOPE), among others. These materials can also be mixed with the DOTMA and DOTAP starting materials in appropriate ratios. Methods for making liposomes using these materials are well known in the art.

[0379] For example, commercially dioleoylphosphatidyl choline (DOPC), dioleoylphosphatidyl glycerol (DOPG), and dioleoylphosphatidyl ethanolamine (DOPE) can be used in various combinations to make conventional liposomes, with or without the addition of cholesterol. Thus, for example, DOPG/DOPC vesicles can be prepared by drying 50 mg each of DOPG and DOPC under a stream of nitrogen gas into a sonication vial. The sample is placed under a vacuum pump overnight and is hydrated the following day with deionized water. The sample is then sonicated for 2 hours in a capped vial, using a Heat Systems model 350 sonicator equipped with an inverted cup (bath type) probe at the maximum setting while the bath is circulated at 15EC. Alternatively, negatively charged vesicles can be prepared without sonication to produce multilamellar vesicles or by extrusion through nucleopore membranes to produce unilamellar vesicles of discrete size. Other methods are known and available to those of skill in the art.

[0380] The liposomes can comprise multilamellar vesicles (MLVs), small unilamellar vesicles (SUVs), or large unilamellar vesicles (LUVs), with SUVs being preferred. The various liposome-nucleic acid complexes are prepared using methods well known in the art. See, e.g., Straubinger et al., Methods of Immunology (1983), 101:512-527, which is herein incorporated by reference. For example, MLVs containing nucleic acid can be prepared by depositing a thin film of phospholipid on the walls of a glass tube and subsequently hydrating with a solution of the material to be encapsulated. SUVs are prepared by extended sonication of MLVs to produce a homogeneous population of unilamellar liposomes. The material to be entrapped is added to a suspension of preformed MLVs and then sonicated. When using liposomes containing cationic lipids, the dried lipid film is resuspended in an appropriate solution such as sterile water or an isotonic buffer solution such as 10 mM Tris/NaCl, sonicated, and then the preformed liposomes are mixed directly with the DNA. The liposome and DNA form a very stable complex due to binding of the positively charged liposomes to the cationic DNA. SUVs find use with small nucleic acid fragments. LUVs are prepared by a number of methods, well known in the art. Commonly used methods include Ca²⁺-EDTA chelation (Papahadjopoulos et al., Biochim. Biophys. Acta (1975) 394:483; Wilson et al., Cell (1979) 17:77); ether injection (Deamer, D. and Bangham, A., Biochim. Biophys. Acta (1976) 443:629; Ostro et al., Biochem. Biophys. Res. Commun. (1977) 76:836; Fraley et al., Proc. Natl. Acad. Sci. USA (1979) 76:3348); detergent dialysis (Enoch, H. and Strittmatter, P., Proc. Natl. Acad. Sci. USA (1979) 76:145); and reverse-phase evaporation (REV) (Fraley et al., J. Biol. Chem. (1980) 255:10431; Szoka, F. and Papahadjopoulos, D., Proc. Natl. Acad. Sci. USA (1978) 75:145; Schaefer-Ridder et al., Science (1982) 215:166), which are herein incorporated by reference.

[0381] Generally, the ratio of DNA to liposomes will be from about 10:1 to about 1:10. Preferably, the ration will be from about 5:1 to about 1:5. More preferably, the ration will be about 3:1 to about 1:3. Still more preferably, the ratio will be about 1:1.

[0382] U.S. Pat. No. 5,676,954 (which is herein incorporated by reference) reports on the injection of genetic material, complexed with cationic liposomes carriers, into mice. U.S. Pat. Nos. 4,897,355, 4,946,787, 5,049,386, 5,459,127, 5,589,466, 5,693,622, 5,580,859, 5,703,055, and international publication no. WO 9419469 (which are herein incorporated by reference) provide cationic lipids for use in transfecting DNA into cells and mammals. U.S. Pat. Nos. 5,589,466, 5,693,622, 5,580,859, 5,703,055, and international publication no. WO 94/9469 (which are herein incorporated by reference) provide methods for delivering DNA-cationic lipid complexes to mammals.

[0383] In certain embodiments, cells are engineered, ex vivo or in vivo, using a retroviral particle containing RNA which comprises a sequence encoding a polypeptide of the present invention. Retroviruses from which the retroviral plasmid vectors may be derived include, but are not limited to, Moloney Murine Leukemia Virus, spleen necrosis virus, Rous sarcoma Virus, Harvey Sarcoma Virus, avian leukosis virus, gibbon ape leukemia virus, human immunodeficiency virus, Myeloproliferative Sarcoma Virus, and mammary tumor virus.

[0384] The retroviral plasmid vector is employed to transduce packaging cell lines to form producer cell lines. Examples of packaging cells which may be transfected include, but are not limited to, the PE501, PA317, R-2, R-AM, PA12, T19-14X, VT-19-17-H2, RCRE, RCRIP, GP+E-86, GP+envAm12, and DAN cell lines as described in Miller, Human Gene Therapy 1:5-14 (1990), which is incorporated herein by reference in its entirety. The vector may transduce the packaging cells through any means known in the art. Such means include, but are not limited to, electroporation, the use of liposomes, and CaPO₄ precipitation. In one alternative, the retroviral plasmid vector may be encapsulated into a liposome, or coupled to a lipid, and then administered to a host.

[0385] The producer cell line generates infectious retroviral vector particles which include polynucleotide encoding a polypeptide of the present invention. Such retroviral vector particles then may be employed, to transduce eukaryotic cells, either in vitro or in vivo. The transduced eukaryotic cells will express a polypeptide of the present invention.

[0386] In certain other embodiments, cells are engineered, ex vivo or in vivo, with polynucleotide contained in an adenovirus vector. Adenovirus can be manipulated such that it encodes and expresses a polypeptide of the present invention, and at the same time is inactivated in terms of its ability to replicate in a normal lytic viral life cycle. Adenovirus expression is achieved without integration of the viral DNA into the host cell chromosome, thereby alleviating concerns about insertional mutagenesis. Furthermore, adenoviruses have been used as live enteric vaccines for many years with an excellent safety profile (Schwartz, A. R. et al. (1974) Am. Rev. Respir. Dis.109:233-238). Finally, adenovirus mediated gene transfer has been demonstrated in a number of instances including transfer of alpha-1-antitrypsin and CFTR to the lungs of cotton rats (Rosenfeld, M. A. et al. (1991) Science 252:431-434; Rosenfeld et al., (1992) Cell 68:143-155). Furthermore, extensive studies to attempt to establish adenovirus as a causative agent in human cancer were uniformly negative (Green, M. et al. (1979) Proc. Natl. Acad. Sci. USA 76:6606).

[0387] Suitable adenoviral vectors useful in the present invention are described, for example, in Kozarsky and Wilson, Curr. Opin. Genet. Devel. 3:499-503 (1993); Rosenfeld et al., Cell 68:143-155 (1992); Engelhardt et al., Human Genet. Ther. 4:759-769 (1993); Yang et al., Nature Genet. 7:362-369 (1994); Wilson et al., Nature 365:691-692 (1993); and U.S. Pat. No. 5,652,224, which are herein incorporated by reference. For example, the adenovirus vector Ad2 is useful and can be grown in human 293 cells. These cells contain the El region of adenovirus and constitutively express Ela and Elb, which complement the defective adenoviruses by providing the products of the genes deleted from the vector. In addition to Ad2, other varieties of adenovirus (e.g., Ad3, Ad5, and Ad7) are also useful in the present invention.

[0388] Preferably, the adenoviruses used in the present invention are replication deficient. Replication deficient adenoviruses require the aid of a helper virus and/or packaging cell line to form infectious particles. The resulting virus is capable of infecting cells and can express a polynucleotide of interest which is operably linked to a promoter, but cannot replicate in most cells. Replication deficient adenoviruses may be deleted in one or more of all or a portion of the following genes: E1a, E1b, E3, E4, E2a, or L1 through L5.

[0389] In certain other embodiments, the cells are engineered, ex vivo or in vivo, using an adeno-associated virus (AAV). AAVs are naturally occurring defective viruses that require helper viruses to produce infectious particles (Muzyczka, N., Curr. Topics in Microbiol. Immunol. 158:97 (1992)). It is also one of the few viruses that may integrate its DNA into non-dividing cells. Vectors containing as little as 300 base pairs of AAV can be packaged and can integrate, but space for exogenous DNA is limited to about 4.5 kb. Methods for producing and using such AAVs are known in the art. See, for example, U.S. Pat. Nos. 5,139,941, 5,173,414, 5,354,678, 5,436,146, 5,474,935, 5,478,745, and 5,589,377.

[0390] For example, an appropriate AAV vector for use in the present invention will include all the sequences necessary for DNA replication, encapsidation, and host-cell integration. The polynucleotide construct is inserted into the AAV vector using standard cloning methods, such as those found in Sambrook et al., Molecular Cloning: A Laboratory Manual, Cold Spring Harbor Press (1989). The recombinant AAV vector is then transfected into packaging cells which are infected with a helper virus, using any standard technique, including lipofection, electroporation, calcium phosphate precipitation, etc. Appropriate helper viruses include adenoviruses, cytomegaloviruses, vaccinia viruses, or herpes viruses. Once the packaging cells are transfected and infected, they will produce infectious AAV viral particles which contain the polynucleotide construct. These viral particles are then used to transduce eukaryotic cells, either ex vivo or in vivo. The transduced cells will contain the polynucleotide construct integrated into its genome, and will express a polypeptide of the invention.

[0391] Another method of gene therapy involves operably associating heterologous control regions and endogenous polynucleotide sequences (e.g. encoding a polypeptide of the present invention) via homologous recombination (see, e.g., U.S. Pat. No. 5,641,670, issued June 24, 1997; International Publication No. WO 96/29411, published Sep. 26, 1996; International Publication No. WO 94/12650, published Aug. 4, 1994; Koller et al., Proc. Natl. Acad. Sci. USA 86:8932-8935 (1989); and Zijlstra et al., Nature 342:435-438 (1989). This method involves the activation of a gene which is present in the target cells, but which is not normally expressed in the cells, or is expressed at a lower level than desired.

[0392] Polynucleotide constructs are made, using standard techniques known in the art, which contain the promoter with targeting sequences flanking the promoter. Suitable promoters are described herein. The targeting sequence is sufficiently complementary to an endogenous sequence to permit homologous recombination of the promoter-targeting sequence with the endogenous sequence. The targeting sequence will be sufficiently near the 5′ end of the desired endogenous polynucleotide sequence so the promoter will be operably linked to the endogenous sequence upon homologous recombination.

[0393] The promoter and the targeting sequences can be amplified using PCR. Preferably, the amplified promoter contains distinct restriction enzyme sites on the 5′ and 3′ ends. Preferably, the 3′ end of the first targeting sequence contains the same restriction enzyme site as the 5′ end of the amplified promoter and the 5′ end of the second targeting sequence contains the same restriction site as the 3′ end of the amplified promoter. The amplified promoter and targeting sequences are digested and ligated together.

[0394] The promoter-targeting sequence construct is delivered to the cells, either as naked polynucleotide, or in conjunction with transfection-facilitating agents, such as liposomes, viral sequences, viral particles, whole viruses, lipofection, precipitating agents, etc., described in more detail above. The P promoter-targeting sequence can be delivered by any method, included direct needle injection, intravenous injection, topical administration, catheter infusion, particle accelerators, etc. The methods are described in more detail below.

[0395] The promoter-targeting sequence construct is taken up by cells. Homologous recombination between the construct and the endogenous sequence takes place, such that an endogenous sequence is placed under the control of the promoter. The promoter then drives the expression of the endogenous sequence.

[0396] Preferably, the polynucleotide encoding a polypeptide of the present invention contains a secretory signal sequence that facilitates secretion of the protein. Typically, the signal sequence is positioned in the coding region of the polynucleotide to be expressed towards or at the 5′ end of the coding region. The signal sequence may be homologous or heterologous to the polynucleotide of interest and may be homologous or heterologous to the cells to be transfected. Additionally, the signal sequence may be chemically synthesized using methods known in the art.

[0397] Any mode of administration of any of the above-described polynucleotides constructs can be used so long as the mode results in the expression of one or more molecules in an amount sufficient to provide a therapeutic effect. This includes direct needle injection, systemic injection, catheter infusion, biolistic injectors, particle accelerators (i.e., “gene guns”), gelfoam sponge depots, other commercially available depot materials, osmotic pumps (e.g., Alza minipumps), oral or suppositorial solid (tablet or pill) pharmaceutical formulations, and decanting or topical applications during surgery. For example, direct injection of naked calcium phosphate-precipitated plasmid into rat liver and rat spleen or a protein-coated plasmid into the portal vein has resulted in gene expression of the foreign gene in the rat livers (Kaneda et al., Science 243:375 (1989)).

[0398] A preferred method of local administration is by direct injection. Preferably, a recombinant molecule of the present invention complexed with a delivery vehicle is administered by direct injection into or locally within the area of arteries. Administration of a composition locally within the area of arteries refers to injecting the composition centimeters and preferably, millimeters within arteries.

[0399] Another method of local administration is to contact a polynucleotide construct of the present invention in or around a surgical wound. For example, a patient can undergo surgery and the polynucleotide construct can be coated on the surface of tissue inside the wound or the construct can be injected into areas of tissue inside the wound.

[0400] Therapeutic compositions useful in systemic administration, include recombinant molecules of the present invention complexed to a targeted delivery vehicle of the present invention. Suitable delivery vehicles for use with systemic administration comprise liposomes comprising ligands for targeting the vehicle to a particular site.

[0401] Preferred methods of systemic administration, include intravenous injection, aerosol, oral and percutaneous (topical) delivery. Intravenous injections can be performed using methods standard in the art. Aerosol delivery can also be performed using methods standard in the art (see, for example, Stribling et al., Proc. Natl. Acad. Sci. USA 189:11277-11281, 1992, which is incorporated herein by reference). Oral delivery can be performed by complexing a polynucleotide construct of the present invention to a carrier capable of withstanding degradation by digestive enzymes in the gut of an animal. Examples of such carriers, include plastic capsules or tablets, such as those known in the art. Topical delivery can be performed by mixing a polynucleotide construct of the present invention with a lipophilic reagent (e.g., DMSO) that is capable of passing into the skin.

[0402] Determining an effective amount of substance to be delivered can depend upon a number of factors including, for example, the chemical structure and biological activity of the substance, the age and weight of the animal, the precise condition requiring treatment and its severity, and the route of administration. The frequency of treatments depends upon a number of factors, such as the amount of polynucleotide constructs administered per dose, as well as the health and history of the subject. The precise amount, number of doses, and timing of doses will be determined by the attending physician or veterinarian.

[0403] Therapeutic compositions of the present invention can be administered to any animal, preferably to mammals and birds. Preferred mammals include humans, dogs, cats, mice, rats, rabbits sheep, cattle, horses and pigs, with humans being particularly preferred.

[0404] Biological Activities

[0405] Polynucleotides or polypeptides, or agonists or antagonists of the present invention, can be used in assays to test for one or more biological activities. If these polynucleotides or polypeptides, or agonists or antagonists of the present invention, do exhibit activity in a particular assay, it is likely that these molecules may be involved in the diseases associated with the biological activity. Thus, the polynucleotides and polypeptides, and agonists or antagonists could be used to treat, prevent diagnose and/or prognose the associated disease.

[0406] The colorectal cancer antigen polynucleotides and polypeptides of the invention are predicted to have predominant expression in colorectal tissues.

[0407] Thus, the colorectal cancer antigens of the invention (e.g., polynucleotides of the invention (e.g., nucleotide coding sequence in SEQ ID NO:X, the nucleotide coding sequence of the related cDNA contained in a deposited library or fragments or variants thereof), polypeptides of the invention (e.g., the polypeptide of SEQ ID NO:Y, a polypeptide encoded by SEQ ID NO:X, a polypeptide encoded by the cDNA in the related cDNA clone contained in a deposited library, and/or fragments or variants thereof), and/or an antibody, or fragment thereof, directed to a polypeptide of the invention) may be useful as therapeutic molecules. Each would be useful for diagnosis, detection, treatment and/or prevention of diseases or disorders of the colon and rectum, including but not limited to colon cancer, adenomatous colon polyps (e.g., villous adenoma), colon carcinoma, colorectal cancer, and/or as described under “Gastrointestinal Disorders” below.

[0408] Particularly, the colorectal cancer antigens may be a useful therapeutic for colorectal cancer. Treatment, diagnosis, detection, and/or prevention of colorectal disorders could be carried out using a colorectal cancer antigen or soluble form of a colorectal cancer antigen, a colorectal cancer antigen ligand, gene therapy, or ex vivo applications. Moreover, inhibitors of a colorectal cancer antigen, either blocking antibodies or mutant forms, could modulate the expression of the colorectal cancer antigen. These inhibitors may be useful to treat, diagnose, detect, and/or prevent diseases associated with the misregulation of a colorectal cancer antigen.

[0409] In one embodiment, the invention provides a method for the specific delivery of compositions of the invention to cells (e.g., normal or diseased colon and/or rectal cells) by administering polypeptides of the invention (e.g., colorectal cancer antigen polypeptides or anti-colorectal cancer antigen antibodies) that are associated with heterologous polypeptides or nucleic acids. In one example, the invention provides a method for delivering a therapeutic protein into the targeted cell (e.g., an aberrant colon and/or rectal cell or colorectal cancer cell). In another example, the invention provides a method for delivering a single stranded nucleic acid (e.g., antisense or ribozymes) or double stranded nucleic acid (e.g., DNA that can integrate into the cell's genome or replicate episomally and that can be transcribed) into the targeted cell.

[0410] In another embodiment, the invention provides a method for the specific destruction of cells (e.g., the destruction of aberrant colorectal cells, including, but not limited to, colorectal tumor cells) by administering polypeptides of the invention (e.g., colorectal cancer antigen polypeptides or fragments thereof, or anti-colorectal cancer antigen antibodies) in association with toxins or cytotoxic prodrugs.

[0411] By “toxin” is meant compounds that bind and activate endogenous cytotoxic effector systems, radioisotopes, holotoxins, modified toxins, catalytic subunits of toxins, cytotoxins (cytotoxic agents), or any molecules or enzymes not normally present in or on the surface of a cell that under defined conditions cause the cell's death. Toxins that may be used according to the methods of the invention include, but are not limited to, radioisotopes known in the art, compounds such as, for example, antibodies (or complement fixing containing portions thereof) that bind an inherent or induced endogenous cytotoxic effector system, thymidine kinase, endonuclease, RNAse, alpha toxin, ricin, abrin, Pseudomonas exotoxin A, diphtheria toxin, saporin, momordin, gelonin, pokeweed antiviral protein, alpha-sarcin and cholera toxin. “Toxin” also includes a cytostatic or cytocidal agent, a therapeutic agent or a radioactive metal ion, e.g., alpha-emitters such as, for example, 213Bi, or other radioisotopes such as, for example, ¹⁰³Pd, ¹³³Xe, 131I, ⁶⁸Ge, ⁵⁷Co, ⁶⁵Zn, ⁸⁵Sr, ³²P, ³⁵S, ⁹⁰Y, ¹⁵³Sm, ¹⁵³Gd, ¹⁶⁹Yb, ⁵¹Cr, ⁵⁴Mn, ⁷⁵Se, ¹¹³Sn, ⁹⁰Yttrium, ¹¹⁷Tin, ¹⁸⁶Rhenium, ¹⁶⁶Holmium, and ¹⁸⁸Rhenium; luminescent labels, such as luminol; and fluorescent labels, such as fluorescein and rhodamine, and biotin.

[0412] Techniques known in the art may be applied to label antibodies of the invention. Such techniques include, but are not limited to, the use of bifunctional conjugating agents (see e.g., U.S. Pat. Nos. 5,756,065; 5,714,631; 5,696,239; 5,652,361; 5,505,931; 5,489,425; 5,435,990; 5,428,139; 5,342,604; 5,274,119; 4,994,560; and 5,808,003; the contents of each of which are hereby incorporated by reference in its entirety). A cytotoxin or cytotoxic agent includes any agent that is detrimental to cells. Examples include paclitaxol, cytochalasin B, gramicidin D, ethidium bromide, emetine, mitomycin, etoposide, tenoposide, vincristine, vinblastine, colchicin, doxorubicin, daunorubicin, dihydroxy anthracin dione, mitoxantrone, mithramycin, actinomycin D, 1-dehydrotestosterone, glucocorticoids, procaine, tetracaine, lidocaine, propranolol, and puromycin and analogs or homologs thereof. Therapeutic agents include, but are not limited to, antimetabolites (e.g., methotrexate, 6-mercaptopurine, 6-thioguanine, cytarabine, 5-fluorouracil decarbazine), alkylating agents (e.g., mechlorethamine, thioepa chlorambucil, melphalan, carmustine (BSNU) and lomustine (CCNU), cyclothosphamide, busulfan, dibromomannitol, streptozotocin, mitomycin C, and cis- dichlorodiamine platinum (II) (DDP) cisplatin), anthracyclines (e.g., daunorubicin (formerly daunomycin) and doxorubicin), antibiotics (e.g., dactinomycin (formerly actinomycin), bleomycin, mithramycin, and anthramycin (AMC)), and anti-mitotic agents (e.g., vincristine and vinblastine).

[0413] By “cytotoxic prodrug” is meant a non-toxic compound that is converted by an enzyme, normally present in the cell, into a cytotoxic compound. Cytotoxic prodrugs that may be used according to the methods of the invention include, but are not limited to, glutamyl derivatives of benzoic acid mustard alkylating agent, phosphate derivatives of etoposide or mitomycin C, cytosine arabinoside, daunorubisin, and phenoxyacetamide derivatives of doxorubicin.

[0414] It will be appreciated that conditions caused by a decrease in the standard or normal level of a colorectal cancer antigen activity in an individual, particularly disorders of the colorectal, can be treated by administration of a colorectal cancer antigen polypeptide (e.g., such as, for example, the complete colorectal cancer antigen polypeptide, the soluble form of the extracellular domain of a colorectal cancer antigen polypeptide, or cells expressing the complete protein) or agonist. Thus, the invention also provides a method of treatment of an individual in need of an increased level of colorectal cancer antigen activity comprising administering to such an individual a pharmaceutical composition comprising an amount of an isolated colorectal cancer antigen polypeptide of the invention, or agonist thereof (e.g., an agonistic anti-colorectal cancer antigen antibody), effective to increase the colorectal cancer antigen activity level in such an individual.

[0415] It will also be appreciated that conditions caused by a increase in the standard or normal level of colorectal cancer antigen activity in an individual, particularly disorders of the colon and/or rectum, can be treated by administration of colorectal cancer antigen polypeptides (e.g., such as, for example, the complete colorectal cancer antigen polypeptide, the soluble form of the extracellular domain of a colorectal cancer antigen polypeptide, or cells expressing the complete protein) or antagonist (e.g., an antagonistic colorectal cancer antigen antibody). Thus, the invention also provides a method of treatment of an individual in need of an decreased level of colorectal cancer antigen activity comprising administering to such an individual a pharmaceutical composition comprising an amount of an isolated colorectal cancer antigen polypeptide of the invention, or antagonist thereof (e.g., an antagonistic anti-colorectal cancer antigen antibody), effective to decrease the colorectal cancer antigen activity level in such an individual.

[0416] More generally, polynucleotides, translation products and antibodies corresponding to this gene may be useful for the diagnosis, prognosis, prevention, and/or treatment of diseases and/or disorders associated with the following systems.

[0417] Gastrointestinal Disorders

[0418] Polynucleotides or polypeptides, or agonists or antagonists of the present invention, may be used to treat, prevent, diagnose, and/or prognose gastrointestinal disorders, including inflammatory diseases and/or conditions, infections, cancers (e.g., intestinal neoplasms (carcinoid tumor of the small intestine, non-Hodgkin's lymphoma of the small intestine, small bowl lymphoma)), and ulcers, such as peptic ulcers.

[0419] Gastrointestinal disorders include dysphagia, odynophagia, inflammation of the esophagus, peptic esophagitis, gastric reflux, submucosal fibrosis and stricturing, Mallory-Weiss lesions, leiomyomas, lipomas, epidermal cancers, adeoncarcinomas, gastric retention disorders, gastroenteritis, gastric atrophy, gastric/stomach cancers, polyps of the stomach, autoimmune disorders such as pernicious anemia, pyloric stenosis, gastritis (bacterial, viral, eosinophilic, stress-induced, chronic erosive, atrophic, plasma cell, and Ménétrier's), and peritoneal diseases (e.g., chyloperioneum, hemoperitoneum, mesenteric cyst, mesenteric lymphadenitis, mesenteric vascular occlusion, panniculitis, neoplasms, peritonitis, pneumoperitoneum, bubphrenic abscess).

[0420] Gastrointestinal disorders also include disorders associated with the small intestine, such as malabsorption syndromes, distension, irritable bowel syndrome, sugar intolerance, celiac disease, duodenal ulcers, duodenitis, tropical sprue, Whipple's disease, intestinal lymphangiectasia, Crohn's disease, appendicitis, obstructions of the ileum, Meckel's diverticulum, multiple diverticula, failure of complete rotation of the small and large intestine, lymphoma, and bacterial and parasitic diseases (such as Traveler's diarrhea, typhoid and paratyphoid, cholera, infection by Roundworms (Ascariasis lumbricoides), Hookworms (Ancylostoma duodenale), Threadworms (Enterobius vernicularis), Tapeworms (Taenia saginata, Echinococcus granulosus, Diphyllobothrium spp., and T. solium).

[0421] Liver diseases and/or disorders include intrahepatic cholestasis (alagille syndrome, biliary liver cirrhosis), fatty liver (alcoholic fatty liver, reye syndrome), hepatic vein thrombosis, hepatolentricular degeneration, hepatomegaly, hepatopulmonary syndrome, hepatorenal syndrome, portal hypertension (esophageal and gastric varices), liver abscess (amebic liver abscess), liver cirrhosis (alcoholic, biliary and experimental), alcoholic liver diseases (fatty liver, hepatitis, cirrhosis), parasitic (hepatic echinococcosis, fascioliasis, amebic liver abscess), jaundice (hemolytic, hepatocellular, and cholestatic), cholestasis, portal hypertension, liver enlargement, ascites, hepatitis (alcoholic hepatitis, animal hepatitis, chronic hepatitis (autoimmune, hepatitis B, hepatitis C, hepatitis D, drug induced), toxic hepatitis, viral human hepatitis (hepatitis A, hepatitis B, hepatitis C, hepatitis D, hepatitis E), Wilson's disease, granulomatous hepatitis, secondary biliary cirrhosis, hepatic encephalopathy, portal hypertension, varices, hepatic encephalopathy, primary biliary cirrhosis, primary sclerosing cholangitis, hepatocellular adenoma, hemangiomas, bile stones, liver failure (hepatic encephalopathy, acute liver failure), and liver neoplasms (angiomyolipoma, calcified liver metastases, cystic liver metastases, epithelial tumors, fibrolamellar hepatocarcinoma, focal nodular hyperplasia, hepatic adenoma, hepatobiliary cystadenoma, hepatoblastoma, hepatocellular carcinoma, hepatoma, liver cancer, liver hemangioendothelioma, mesenchymal hamartoma, mesenchymal tumors of liver, nodular regenerative hyperplasia, benign liver tumors (Hepatic cysts [Simple cysts, Polycystic liver disease, Hepatobiliary cystadenoma, Choledochal cyst], Mesenchymal tumors [Mesenchymal hamartoma, Infantile hemangioendothelioma, Hemangioma, Peliosis hepatis, Lipomas, Inflammatory pseudotumor, Miscellaneous], Epithelial tumors [Bile duct epithelium (Bile duct hamartoma, Bile duct adenoma), Hepatocyte (Adenoma, Focal nodular hyperplasia, Nodular regenerative hyperplasia)], malignant liver tumors [hepatocellular, hepatoblastoma, hepatocellular carcinoma, cholangiocellular, cholangiocarcinoma, cystadenocarcinoma, tumors of blood vessels, angiosarcoma, Karposi's sarcoma, hemangioendothelioma, other tumors, embryonal sarcoma, fibrosarcoma, leiomyosarcoma, rhabdomyosarcoma, carcinosarcoma, teratoma, carcinoid, squamous carcinoma, primary lymphoma]), peliosis hepatis, erythrohepatic porphyria, hepatic porphyria (acute intermittent porphyria, porphyria cutanea tarda), Zellweger syndrome).

[0422] Pancreatic diseases and/or disorders include acute pancreatitis, chronic pancreatitis (acute necrotizing pancreatitis, alcoholic pancreatitis), neoplasms (adenocarcinoma of the pancreas, cystadenocarcinoma, insulinoma, gastrinoma, and glucagonoma, cystic neoplasms, islet-cell tumors, pancreoblastoma), and other pancreatic diseases (e.g., cystic fibrosis, cyst (pancreatic pseudocyst, pancreatic fistula, insufficiency)).

[0423] Gallbladder diseases include gallstones (cholelithiasis and choledocholithiasis), postcholecystectomy syndrome, diverticulosis of the gallbladder, acute cholecystitis, chronic cholecystitis, bile duct tumors, and mucocele.

[0424] Diseases and/or disorders of the large intestine include antibiotic-associated colitis, diverticulitis, ulcerative colitis, acquired megacolon, abscesses, fungal and bacterial infections, anorectal disorders (e.g., fissures, hemorrhoids), colonic diseases (colitis, colonic neoplasms [colon cancer, adenomatous colon polyps (e.g., villous adenoma), colon carcinoma, colorectal cancer], colonic diverticulitis, colonic diverticulosis, megacolon [Hirschsprung disease, toxic megacolon]; sigmoid diseases [proctocolitis, sigmoin neoplasms]), constipation, Crohn's disease, diarrhea (infantile diarrhea, dysentery), duodenal diseases (duodenal neoplasms, duodenal obstruction, duodenal ulcer, duodenitis), enteritis (enterocolitis), HIV enteropathy, ileal diseases (ileal neoplasms, ileitis), immunoproliferative small intestinal disease, inflammatory bowel disease (ulcerative colitis, Crohn's disease), intestinal atresia, parasitic diseases (anisakiasis, balantidiasis, blastocystis infections, cryptosporidiosis, dientamoebiasis, amebic dysentery, giardiasis), intestinal fistula (rectal fistula), intestinal neoplasms (cecal neoplasms, colonic neoplasms, duodenal neoplasms, ileal neoplasms, intestinal polyps, jejunal neoplasms, rectal neoplasms), intestinal obstruction (afferent loop syndrome, duodenal obstruction, impacted feces, intestinal pseudo-obstruction [cecal volvulus], intussusception), intestinal perforation, intestinal polyps (colonic polyps, gardner syndrome, peutz-jeghers syndrome), jejunal diseases (jejunal neoplasms), malabsorption syndromes (blind loop syndrome, celiac disease, lactose intolerance, short bowl syndrome, tropical sprue, whipple's disease), mesenteric vascular occlusion, pneumatosis cystoides intestinalis, protein-losing enteropathies (intestinal lymphagiectasis), rectal diseases (anus diseases, fecal incontinence, hemorrhoids, proctitis, rectal fistula, rectal prolapse, rectocele), peptic ulcer (duodenal ulcer, peptic esophagitis, hemorrhage, perforation, stomach ulcer, Zollinger-Ellison syndrome), postgastrectomy syndromes (dumping syndrome), stomach diseases (e.g., achlorhydria, duodenogastric reflux (bile reflux), gastric antral vascular ectasia, gastric fistula, gastric outlet obstruction, gastritis (atrophic or hypertrophic), gastroparesis, stomach dilatation, stomach diverticulum, stomach neoplasms (gastric cancer, gastric polyps, gastric adenocarcinoma, hyperplastic gastric polyp), stomach rupture, stomach ulcer, stomach volvulus), tuberculosis, visceroptosis, vomiting (e.g., hematemesis, hyperemesis gravidarum, postoperative nausea and vomiting) and hemorrhagic colitis.

[0425] Further diseases and/or disorders of the gastrointestinal system include biliary tract diseases, such as, gastroschisis, fistula (e.g., biliary fistula, esophageal fistula, gastric fistula, intestinal fistula, pancreatic fistula), neoplasms (e.g., biliary tract neoplasms, esophageal neoplasms, such as adenocarcinoma of the esophagus, esophageal squamous cell carcinoma, gastrointestinal neoplasms, pancreatic neoplasms, such as adenocarcinoma of the pancreas, mucinous cystic neoplasm of the pancreas, pancreatic cystic neoplasms, pancreatoblastoma, and peritoneal neoplasms), esophageal disease (e.g., bullous diseases, candidiasis, glycogenic acanthosis, ulceration, barrett esophagus varices, atresia, cyst, diverticulum (e.g., Zenker's diverticulum), fistula (e.g., tracheoesophageal fistula), motility disorders (e.g., CREST syndrome, deglutition disorders, achalasia, spasm, gastroesophageal reflux), neoplasms, perforation (e.g., Boerhaave syndrome, Mallory-Weiss syndrome), stenosis, esophagitis, diaphragmatic hernia (e.g., hiatal hernia); gastrointestinal diseases, such as, gastroenteritis (e.g., cholera morbus, norwalk virus infection), hemorrhage (e.g., hematemesis, melena, peptic ulcer hemorrhage), stomach neoplasms (gastric cancer, gastric polyps, gastric adenocarcinoma, stomach cancer)), hernia (e.g., congenital diaphragmatic hernia, femoral hernia, inguinal hernia, obturator hernia, umbilical hernia, ventral hernia), and intestinal diseases (e.g., cecal diseases (appendicitis, cecal neoplasms)).

[0426] Immune Activity

[0427] Polynucleotides, polypeptides, antibodies, and/or agonists or antagonists of the present invention may be useful in treating, preventing, diagnosing and/or prognosing diseases, disorders, and/or conditions of the immune system, by, for example, activating or inhibiting the proliferation, differentiation, or mobilization (chemotaxis) of immune cells. Immune cells develop through a process called hematopoiesis, producing myeloid (platelets, red blood cells, neutrophils, and macrophages) and lymphoid (B and T lymphocytes) cells from pluripotent stem cells. The etiology of these immune diseases, disorders, and/or conditions may be genetic, somatic, such as cancer and some autoimmune diseases, acquired (e.g., by chemotherapy or toxins), or infectious. Moreover, polynucleotides, polypeptides, antibodies, and/or agonists or antagonists of the present invention can be used as a marker or detector of a particular immune system disease or disorder.

[0428] Polynucleotides, polypeptides, antibodies, and/or agonists or antagonists of the present invention may be useful in treating, preventing, diagnosing, and/or prognosing immunodeficiencies, including both congenital and acquired immunodeficiencies. Examples of B cell immunodeficiencies in which immunoglobulin levels B cell function and/or B cell numbers are decreased include: X-linked agammaglobulinemia (Bruton's disease), X-linked infantile agammaglobulinemia, X-linked immunodeficiency with hyper IgM, non X-linked immunodeficiency with hyper IgM, X-linked lymphoproliferative syndrome (XLP), agammaglobulinemia including congenital and acquired agammaglobulinemia, adult onset agammaglobulinemia, late-onset agammaglobulinemia, dysgammaglobulinemia, hypogammaglobulinemia, unspecified hypogammaglobulinemia, recessive agammaglobulinemia (Swiss type), Selective IgM deficiency, selective IgA deficiency, selective IgG subclass deficiencies, IgG subclass deficiency (with or without IgA deficiency), Ig deficiency with increased IgM, IgG and IgA deficiency with increased IgM, antibody deficiency with normal or elevated Igs, Ig heavy chain deletions, kappa chain deficiency, B cell lymphoproliferative disorder (BLPD), common variable immunodeficiency (CVID), common variable immunodeficiency (CVI) (acquired), and transient hypogammaglobulinemia of infancy.

[0429] In specific embodiments, ataxia-telangiectasia or conditions associated with ataxia-telangiectasia are treated, prevented, diagnosed, and/or prognosing using the polypeptides or polynucleotides of the invention, and/or agonists or antagonists thereof.

[0430] Examples of congenital immunodeficiencies in which T cell and/or B cell function and/or number is decreased include, but are not limited to: DiGeorge anomaly, severe combined immunodeficiencies (SCID) (including, but not limited to, X-linked SCID, autosomal recessive SCID, adenosine deaminase deficiency, purine nucleoside phosphorylase (PNP) deficiency, Class II MHC deficiency (Bare lymphocyte syndrome), Wiskott-Aldrich syndrome, and ataxia telangiectasia), thymic hypoplasia, third and fourth pharyngeal pouch syndrome, 22q11.2 deletion, chronic mucocutaneous candidiasis, natural killer cell deficiency (NK), idiopathic CD4+T-lymphocytopenia, immunodeficiency with predominant T cell defect (unspecified), and unspecified immunodeficiency of cell mediated immunity.

[0431] In specific embodiments, DiGeorge anomaly or conditions associated with DiGeorge anomaly are treated, prevented, diagnosed, and/or prognosed using polypeptides or polynucleotides of the invention, or antagonists or agonists thereof.

[0432] Other immunodeficiencies that may be treated, prevented, diagnosed, and/or prognosed using polypeptides or polynucleotides of the invention, and/or agonists or antagonists thereof, include, but are not limited to, chronic granulomatous disease, Chediak-Higashi syndrome, myeloperoxidase deficiency, leukocyte glucose-6-phosphate dehydrogenase deficiency, X-linked lymphoproliferative syndrome (XLP), leukocyte adhesion deficiency, complement component deficiencies (including C1, C2, C3, C4, C5, C6, C7, C8 and/or C9 deficiencies), reticular dysgenesis, thymic alymphoplasia-aplasia, immunodeficiency with thymoma, severe congenital leukopenia, dysplasia with immunodeficiency, neonatal neutropenia, short limbed dwarfism, and Nezelof syndrome-combined immunodeficiency with Igs.

[0433] In a preferred embodiment, the immunodeficiencies and/or conditions associated with the immunodeficiencies recited above are treated, prevented, diagnosed and/or prognosed using polynucleotides, polypeptides, antibodies, and/or agonists or antagonists of the present invention.

[0434] In a preferred embodiment polynucleotides, polypeptides, antibodies, and/or agonists or antagonists of the present invention could be used as an agent to boost immunoresponsiveness among immunodeficient individuals. In specific embodiments, polynucleotides, polypeptides, antibodies, and/or agonists or antagonists of the present invention could be used as an agent to boost immunoresponsiveness among B cell and/or T cell immunodeficient individuals.

[0435] The polynucleotides, polypeptides, antibodies, and/or agonists or antagonists of the present invention may be useful in treating, preventing, diagnosing and/or prognosing autoimmune disorders. Many autoimmune disorders result from inappropriate recognition of self as foreign material by immune cells. This inappropriate recognition results in an immune response leading to the destruction of the host tissue. Therefore, the administration of polynucleotides and polypeptides of the invention that can inhibit an immune response, particularly the proliferation, differentiation, or chemotaxis of T-cells, may be an effective therapy in preventing autoimmune disorders.

[0436] Autoimmune diseases or disorders that may be treated, prevented, diagnosed and/or prognosed by polynucleotides, polypeptides, antibodies, and/or agonists or antagonists of the present invention include, but are not limited to, one or more of the following: systemic lupus erythematosus, rheumatoid arthritis, ankylosing spondylitis, multiple sclerosis, autoimmune thyroiditis, Hashimoto's thyroiditis, autoimmune hemolytic anemia, hemolytic anemia, thrombocytopenia, autoimmune thrombocytopenia purpura, autoimmune neonatal thrombocytopenia, idiopathic thrombocytopenia purpura, purpura (e.g., Henloch-Scoenlein purpura), autoimmunocytopenia, Goodpasture's syndrome, Pemphigus vulgaris, myasthenia gravis, Grave's disease (hyperthyroidism), and insulin-resistant diabetes mellitus.

[0437] Additional disorders that are likely to have an autoimmune component that may be treated, prevented, and/or diagnosed with the compositions of the invention include, but are not limited to, type II collagen-induced arthritis, antiphospholipid syndrome, dermatitis, allergic encephalomyelitis, myocarditis, relapsing polychondritis, rheumatic heart disease, neuritis, uveitis ophthalmia, polyendocrinopathies, Reiter's Disease, Stiff-Man Syndrome, autoimmune pulmonary inflammation, autism, Guillain-Barre Syndrome, insulin dependent diabetes mellitus, and autoimmune inflammatory eye disorders.

[0438] Additional disorders that are likely to have an autoimmune component that may be treated, prevented, diagnosed and/or prognosed with the compositions of the invention include, but are not limited to, scleroderna with anti-collagen antibodies (often characterized, e.g., by nucleolar and other nuclear antibodies), mixed connective tissue disease (often characterized, e.g., by antibodies to extractable nuclear antigens (e.g., ribonucleoprotein)), polymyositis (often characterized, e.g., by nonhistone ANA), pernicious anemia (often characterized, e.g., by antiparietal cell, microsomes, and intrinsic factor antibodies), idiopathic Addison's disease (often characterized, e.g., by humoral and cell-mediated adrenal cytotoxicity, infertility (often characterized, e.g., by antispermatozoal antibodies), glomerulonephritis (often characterized, e.g., by glomerular basement membrane antibodies or immune complexes), bullous pemphigoid (often characterized, e.g., by IgG and complement in basement membrane), Sjogren's syndrome (often characterized, e.g., by multiple tissue antibodies, and/or a specific nonhistone ANA (SS-B)), diabetes mellitus (often characterized, e.g., by cell-mediated and humoral islet cell antibodies), and adrenergic drug resistance (including adrenergic drug resistance with asthma or cystic fibrosis) (often characterized, e.g., by beta-adrenergic receptor antibodies).

[0439] Additional disorders that may have an autoimmune component that may be treated, prevented, diagnosed and/or prognosed with the compositions of the invention include, but are not limited to, chronic active hepatitis (often characterized, e.g., by smooth muscle antibodies), primary biliary cirrhosis (often characterized, e.g., by mitochondria antibodies), other endocrine gland failure (often characterized, e.g., by specific tissue antibodies in some cases), vitiligo (often characterized, e.g., by melanocyte antibodies), vasculitis (often characterized, e.g., by Ig and complement in vessel walls and/or low serum complement), post-MI (often characterized, e.g., by myocardial antibodies), cardiotomy syndrome (often characterized, e.g., by myocardial antibodies), urticaria (often characterized, e.g., by IgG and IgM antibodies to IgE), atopic dermatitis (often characterized, e.g., by IgG and IgM antibodies to IgE), asthma (often characterized, e.g., by IgG and IgM antibodies to IgE), and many other inflammatory, granulomatous, degenerative, and atrophic disorders.

[0440] In a preferred embodiment, the autoimmune diseases and disorders and/or conditions associated with the diseases and disorders recited above are treated, prevented, diagnosed and/or prognosed using for example, antagonists or agonists, polypeptides or polynucleotides, or antibodies of the present invention. In a specific preferred embodiment, rheumatoid arthritis is treated, prevented, and/or diagnosed using polynucleotides, polypeptides, antibodies, and/or agonists or antagonists of the present invention.

[0441] In another specific preferred embodiment, systemic lupus erythematosus is treated, prevented, and/or diagnosed using polynucleotides, polypeptides, antibodies, and/or agonists or antagonists of the present invention. In another specific preferred embodiment, idiopathic thrombocytopenia purpura is treated, prevented, and/or diagnosed using polynucleotides, polypeptides, antibodies, and/or agonists or antagonists of the present invention.

[0442] In another specific preferred embodiment IgA nephropathy is treated, prevented, and/or diagnosed using polynucleotides, polypeptides, antibodies, and/or agonists or antagonists of the present invention.

[0443] In a preferred embodiment, the autoimmune diseases and disorders and/or conditions associated with the diseases and disorders recited above are treated, prevented, diagnosed and/or prognosed using polynucleotides, polypeptides, antibodies, and/or agonists or antagonists of the present invention.

[0444] In preferred embodiments, polypeptides, antibodies, polynucleotides and/or agonists or antagonists of the present invention are used as a immunosuppressive agent(s).

[0445] Polynucleotides, polypeptides, antibodies, and/or agonists or antagonists of the present invention may be useful in treating, preventing, prognosing, and/or diagnosing diseases, disorders, and/or conditions of hematopoietic cells. Polynucleotides, polypeptides, antibodies, and/or agonists or antagonists of the present invention could be used to increase differentiation and proliferation of hematopoietic cells, including the pluripotent stem cells, in an effort to treat or prevent those diseases, disorders, and/or conditions associated with a decrease in certain (or many) types hematopoietic cells, including but not limited to, leukopenia, neutropenia, anemia, and thrombocytopenia. Alternatively, Polynucleotides, polypeptides, antibodies, and/or agonists or antagonists of the present invention could be used to increase differentiation and proliferation of hematopoietic cells, including the pluripotent stem cells, in an effort to treat or prevent those diseases, disorders, and/or conditions associated with an increase in certain (or many) types of hematopoietic cells, including but not limited to, histiocytosis.

[0446] Allergic reactions and conditions, such as asthma (particularly allergic asthma) or other respiratory problems, may also be treated, prevented, diagnosed and/or prognosed using polypeptides, antibodies, or polynucleotides of the invention, and/or agonists or antagonists thereof. Moreover, these molecules can be used to treat, prevent, prognose, and/or diagnose anaphylaxis, hypersensitivity to an antigenic molecule, or blood group incompatibility.

[0447] Additionally, polypeptides or polynucleotides of the invention, and/or agonists or antagonists thereof, may be used to treat, prevent, diagnose and/or prognose IgE-mediated allergic reactions. Such allergic reactions include, but are not limited to, asthma, rhinitis, and eczema. In specific embodiments, polynucleotides, polypeptides, antibodies, and/or agonists or antagonists of the present invention may be used to modulate IgE concentrations in vitro or in vivo.

[0448] Moreover, polynucleotides, polypeptides, antibodies, and/or agonists or antagonists of the present invention have uses in the diagnosis, prognosis, prevention, and/or treatment of inflammatory conditions. For example, since polypeptides, antibodies, or polynucleotides of the invention, and/or agonists or antagonists of the invention may inhibit the activation, proliferation and/or differentiation of cells involved in an inflammatory response, these molecules can be used to prevent and/or treat chronic and acute inflammatory conditions. Such inflammatory conditions include, but are not limited to, for example, inflammation associated with infection (e.g., septic shock, sepsis, or systemic inflammatory response syndrome), ischemia-reperfusion injury, endotoxin lethality, complement-mediated hyperacute rejection, nephritis, cytokine or chemokine induced lung injury, inflammatory bowel disease, Crohn's disease, over production of cytokines (e.g., TNF or IL-1.), respiratory disorders (e.g., asthma and allergy); gastrointestinal disorders (e.g., inflammatory bowel disease); cancers (e.g., gastric, ovarian, lung, bladder, liver, and breast); CNS disorders (e.g., multiple sclerosis; ischemic brain injury and/or stroke, traumatic brain injury, neurodegenerative disorders (e.g., Parkinson's disease and Alzheimer's disease); AIDS-related dementia; and prion disease); cardiovascular disorders (e.g., atherosclerosis, myocarditis, cardiovascular disease, and cardiopulmonary bypass complications); as well as many additional diseases, conditions, and disorders that are characterized by inflammation (e.g., hepatitis, rheumatoid arthritis, gout, trauma, pancreatitis, sarcoidosis, dermatitis, renal ischemia-reperfusion injury, Grave's disease, systemic lupus erythematosus, diabetes mellitus, and allogenic transplant rejection).

[0449] Because inflammation is a fundamental defense mechanism, inflammatory disorders can effect virtually any tissue of the body. Accordingly, polynucleotides, polypeptides, and antibodies of the invention, as well as agonists or antagonists thereof, have uses in the treatment of tissue-specific inflammatory disorders, including, but not limited to, adrenalitis, alveolitis, angiocholecystitis, appendicitis, balanitis, blepharitis, bronchitis, bursitis, carditis, cellulitis, cervicitis, cholecystitis, chorditis, cochlitis, colitis, conjunctivitis, cystitis, dermatitis, diverticulitis, encephalitis, endocarditis, esophagitis, eustachitis, fibrositis, folliculitis, gastritis, gastroenteritis, gingivitis, glossitis, hepatosplenitis, keratitis, labyrinthitis, laryngitis, lymphangitis, mastitis, media otitis, meningitis, metritis, mucitis, myocarditis, myosititis, myringitis, nephritis, neuritis, orchitis, osteochondritis, otitis, pericarditis, peritendonitis, peritonitis, pharyngitis, phlebitis, poliomyelitis, prostatitis, pulpitis, retinitis, rhinitis, salpingitis, scleritis, sclerochoroiditis, scrotitis, sinusitis, spondylitis, steatitis, stomatitis, synovitis, syringitis, tendonitis, tonsillitis, urethritis, and vaginitis.

[0450] In specific embodiments, polypeptides, antibodies, or polynucleotides of the invention, and/or agonists or antagonists thereof, are useful to diagnose, prognose, prevent, and/or treat organ transplant rejections and graft-versus-host disease. Organ rejection occurs by host immune cell destruction of the transplanted tissue through an immune response. Similarly, an immune response is also involved in GVHD, but, in this case, the foreign transplanted immune cells destroy the host tissues. Polypeptides, antibodies, or polynucleotides of the invention, and/or agonists or antagonists thereof, that inhibit an immune response, particularly the activation, proliferation, differentiation, or chemotaxis of T-cells, may be an effective therapy in preventing organ rejection or GVHD. In specific embodiments, polypeptides, antibodies, or polynucleotides of the invention, and/or agonists or antagonists thereof, that inhibit an immune response, particularly the activation, proliferation, differentiation, or chemotaxis of T-cells, may be an effective therapy in preventing experimental allergic and hyperacute xenograft rejection.

[0451] In other embodiments, polypeptides, antibodies, or polynucleotides of the invention, and/or agonists or antagonists thereof, are useful to diagnose, prognose, prevent, and/or treat immune complex diseases, including, but not limited to, serum sickness, post streptococcal glomerulonephritis, polyarteritis nodosa, and immune complex-induced vasculitis.

[0452] Polypeptides, antibodies, polynucleotides and/or agonists or antagonists of the invention can be used to treat, detect, and/or prevent infectious agents. For example, by increasing the immune response, particularly increasing the proliferation activation and/or differentiation of B and/or T cells, infectious diseases may be treated, detected, and/or prevented. The immune response may be increased by either enhancing an existing immune response, or by initiating a new immune response. Alternatively, polynucleotides, polypeptides, antibodies, and/or agonists or antagonists of the present invention may also directly inhibit the infectious agent (refer to section of application listing infectious agents, etc), without necessarily eliciting an immune response.

[0453] In another embodiment, polypeptides, antibodies, polynucleotides and/or agonists or antagonists of the present invention are used as a vaccine adjuvant that enhances immune responsiveness to an antigen. In a specific embodiment, polypeptides, antibodies, polynucleotides and/or agonists or antagonists of the present invention are used as an adjuvant to enhance tumor-specific immune responses.

[0454] In another specific embodiment, polypeptides, antibodies, polynucleotides and/or agonists or antagonists of the present invention are used as an adjuvant to enhance anti-viral immune responses. Anti-viral immune responses that may be enhanced using the compositions of the invention as an adjuvant, include virus and virus associated diseases or symptoms described herein or otherwise known in the art. In specific embodiments, the compositions of the invention are used as an adjuvant to enhance an immune response to a virus, disease, or symptom selected from the group consisting of: AIDS, meningitis, Dengue, EBV, and hepatitis (e.g., hepatitis B). In another specific embodiment, the compositions of the invention are used as an adjuvant to enhance an immune response to a virus, disease, or symptom selected from the group consisting of: HIV/AIDS, respiratory syncytial virus, Dengue, rotavirus, Japanese B encephalitis, influenza A and B, parainfluenza, measles, cytomegalovirus, rabies, Junin, Chikungunya, Rift Valley Fever, herpes simplex, and yellow fever.

[0455] In another specific embodiment, polypeptides, antibodies, polynucleotides and/or agonists or antagonists of the present invention are used as an adjuvant to enhance anti-bacterial or anti-fungal immune responses. Anti-bacterial or anti-fungal immune responses that may be enhanced using the compositions of the invention as an adjuvant, include bacteria or fungus and bacteria or fungus associated diseases or symptoms described herein or otherwise known in the art. In specific embodiments, the compositions of the invention are used as an adjuvant to enhance an immune response to a bacteria or fungus, disease, or symptom selected from the group consisting of: tetanus, Diphtheria, botulism, and meningitis type B.

[0456] In another specific embodiment, the compositions of the invention are used as an adjuvant to enhance an immune response to a bacteria or fungus, disease, or symptom selected from the group consisting of: Vibrio cholerae, Mycobacterium leprae, Salmonella typhi, Salmonella paratyphi, Meisseria meningitidis, Streptococcus pneumoniae, Group B streptococcus, Shigella spp., Enterotoxigenic Escherichia coli, Enterohemorrhagic E. coli, and Borrelia burgdorferi.

[0457] In another specific embodiment, polypeptides, antibodies, polynucleotides and/or agonists or antagonists of the present invention are used as an adjuvant to enhance anti-parasitic immune responses. Anti-parasitic immune responses that may be enhanced using the compositions of the invention as an adjuvant, include parasite and parasite associated diseases or symptoms described herein or otherwise known in the art. In specific embodiments, the compositions of the invention are used as an adjuvant to enhance an immune response to a parasite. In another specific embodiment, the compositions of the invention are used as an adjuvant to enhance an immune response to Plasmodium (malaria) or Leishmania.

[0458] In another specific embodiment, polypeptides, antibodies, polynucleotides and/or agonists or antagonists of the present invention may also be employed to treat infectious diseases including silicosis, sarcoidosis, and idiopathic pulmonary fibrosis; for example, by preventing the recruitment and activation of mononuclear phagocytes.

[0459] In another specific embodiment, polypeptides, antibodies, polynucleotides and/or agonists or antagonists of the present invention are used as an antigen for the generation of antibodies to inhibit or enhance immune mediated responses against polypeptides of the invention.

[0460] In one embodiment, polypeptides, antibodies, polynucleotides and/or agonists or antagonists of the present invention are administered to an animal (e.g., mouse, rat, rabbit, hamster, guinea pig, pigs, micro-pig, chicken, camel, goat, horse, cow, sheep, dog, cat, non-human primate, and human, most preferably human) to boost the immune system to produce increased quantities of one or more antibodies (e.g., IgG, IgA, IgM, and IgE), to induce higher affinity antibody production and immunoglobulin class switching (e.g., IgG, IgA, IgM, and IgE), and/or to increase an immune response.

[0461] In another specific embodiment, polypeptides, antibodies, polynucleotides and/or agonists or antagonists of the present invention are used as a stimulator of B cell responsiveness to pathogens.

[0462] In another specific embodiment, polypeptides, antibodies, polynucleotides and/or agonists or antagonists of the present invention are used as an activator of T cells.

[0463] In another specific embodiment, polypeptides, antibodies, polynucleotides and/or agonists or antagonists of the present invention are used as an agent that elevates the immune status of an individual prior to their receipt of immunosuppressive therapies.

[0464] In another specific embodiment, polypeptides, antibodies, polynucleotides and/or agonists or antagonists of the present invention are used as an agent to induce higher affinity antibodies.

[0465] In another specific embodiment, polypeptides, antibodies, polynucleotides and/or agonists or antagonists of the present invention are used as an agent to increase serum immunoglobulin concentrations.

[0466] In another specific embodiment, polypeptides, antibodies, polynucleotides and/or agonists or antagonists of the present invention are used as an agent to accelerate recovery of immunocompromised individuals.

[0467] In another specific embodiment, polypeptides, antibodies, polynucleotides and/or agonists or antagonists of the present invention are used as an agent to boost immunoresponsiveness among aged populations and/or neonates.

[0468] In another specific embodiment, polypeptides, antibodies, polynucleotides and/or agonists or antagonists of the present invention are used as an immune system enhancer prior to, during, or after bone marrow transplant and/or other transplants (e.g., allogeneic or xenogeneic organ transplantation). With respect to transplantation, compositions of the invention may be administered prior to, concomitant with, and/or after transplantation. In a specific embodiment, compositions of the invention are administered after transplantation, prior to the beginning of recovery of T-cell populations. In another specific embodiment, compositions of the invention are first administered after transplantation after the beginning of recovery of T cell populations, but prior to full recovery of B cell populations.

[0469] In another specific embodiment, polypeptides, antibodies, polynucleotides and/or agonists or antagonists of the present invention are used as an agent to boost immunoresponsiveness among individuals having an acquired loss of B cell function. Conditions resulting in an acquired loss of B cell function that may be ameliorated or treated by administering the polypeptides, antibodies, polynucleotides and/or agonists or antagonists thereof, include, but are not limited to, HIV Infection, AIDS, bone marrow transplant, and B cell chronic lymphocytic leukemia (CLL).

[0470] In another specific embodiment, polypeptides, antibodies, polynucleotides and/or agonists or antagonists of the present invention are used as an agent to boost immunoresponsiveness among individuals having a temporary immune deficiency. Conditions resulting in a temporary immune deficiency that may be ameliorated or treated by administering the polypeptides, antibodies, polynucleotides and/or agonists or antagonists thereof, include, but are not limited to, recovery from viral infections (e.g., influenza), conditions associated with malnutrition, recovery from infectious mononucleosis, or conditions associated with stress, recovery from measles, recovery from blood transfusion, and recovery from surgery.

[0471] In another specific embodiment, polypeptides, antibodies, polynucleotides and/or agonists or antagonists of the present invention are used as a regulator of antigen presentation by monocytes, dendritic cells, and/or B-cells. In one embodiment, polynucleotides, polypeptides, antibodies, and/or agonists or antagonists of the present invention enhance antigen presentation or antagonizes antigen presentation in vitro or in vivo. Moreover, in related embodiments, said enhancement or antagonism of antigen presentation may be useful as an anti-tumor treatment or to modulate the immune system.

[0472] In another specific embodiment, polypeptides, antibodies, polynucleotides and/or agonists or antagonists of the present invention are used as an agent to direct an individual's immune system towards development of a humoral response (i.e. TH2) as opposed to a TH1 cellular response.

[0473] In another specific embodiment, polypeptides, antibodies, polynucleotides and/or agonists or antagonists of the present invention are used as a means to induce tumor proliferation and thus make it more susceptible to anti-neoplastic agents. For example, multiple myeloma is a slowly dividing disease and is thus refractory to virtually all anti-neoplastic regimens. If these cells were forced to proliferate more rapidly their susceptibility profile would likely change.

[0474] In another specific embodiment, polypeptides, antibodies, polynucleotides and/or agonists or antagonists of the present invention are used as a stimulator of B cell production in pathologies such as AIDS, chronic lymphocyte disorder and/or Common Variable Immunodificiency.

[0475] In another specific embodiment, polypeptides, antibodies, polynucleotides and/or agonists or antagonists of the present invention are used as a therapy for generation and/or regeneration of lymphoid tissues following surgery, trauma or genetic defect. In another specific embodiment, polypeptides, antibodies, polynucleotides and/or agonists or antagonists of the present invention are used in the pretreatment of bone marrow samples prior to transplant.

[0476] In another specific embodiment, polypeptides, antibodies, polynucleotides and/or agonists or antagonists of the present invention are used as a gene-based therapy for genetically inherited disorders resulting in immuno-incompetence/immunodeficiency such as observed among SCID patients.

[0477] In another specific embodiment, polypeptides, antibodies, polynucleotides and/or agonists or antagonists of the present invention are used as a means of activating monocytes/macrophages to defend against parasitic diseases that effect monocytes such as Leishmania.

[0478] In another specific embodiment, polypeptides, antibodies, polynucleotides and/or agonists or antagonists of the present invention are used as a means of regulating secreted cytokines that are elicited by polypeptides of the invention.

[0479] In another embodiment, polypeptides, antibodies, polynucleotides and/or agonists or antagonists of the present invention are used in one or more of the applications decribed herein, as they may apply to veterinary medicine.

[0480] In another specific embodiment, polypeptides, antibodies, polynucleotides and/or agonists or antagonists of the present invention are used as a means of blocking various aspects of immune responses to foreign agents or self. Examples of diseases or conditions in which blocking of certain aspects of immune responses may be desired include autoimmune disorders such as lupus, and arthritis, as well as immunoresponsiveness to skin allergies, inflammation, bowel disease, injury and diseases/disorders associated with pathogens.

[0481] In another specific embodiment, polypeptides, antibodies, polynucleotides and/or agonists or antagonists of the present invention are used as a therapy for preventing the B cell proliferation and Ig secretion associated with autoimmune diseases such as idiopathic thrombocytopenic purpura, systemic lupus erythematosus and multiple sclerosis.

[0482] In another specific embodiment, polypeptides, antibodies, polynucleotides and/or agonists or antagonists of the present invention are used as a inhibitor of B and/or T cell migration in endothelial cells. This activity disrupts tissue architecture or cognate responses and is useful, for example in disrupting immune responses, and blocking sepsis.

[0483] In another specific embodiment, polypeptides, antibodies, polynucleotides and/or agonists or antagonists of the present invention are used as a therapy for chronic hypergammaglobulinemia evident in such diseases as monoclonal gammopathy of undetermined significance (MGUS), Waldenstrom's disease, related idiopathic monoclonal gammopathies, and plasmacytomas.

[0484] In another specific embodiment, polypeptides, antibodies, polynucleotides and/or agonists or antagonists of the present invention may be employed for instance to inhibit polypeptide chemotaxis and activation of macrophages and their precursors, and of neutrophils, basophils, B lymphocytes and some T-cell subsets, e.g., activated and CD8 cytotoxic T cells and natural killer cells, in certain autoimmune and chronic inflammatory and infective diseases. Examples of autoimmune diseases are described herein and include multiple sclerosis, and insulin-dependent diabetes.

[0485] The polypeptides, antibodies, polynucleotides and/or agonists or antagonists of the present invention may also be employed to treat idiopathic hyper-eosinophilic syndrome by, for example, preventing eosinophil production and migration.

[0486] In another specific embodiment, polypeptides, antibodies, polynucleotides and/or agonists or antagonists of the present invention are used to enhance or inhibit complement mediated cell lysis.

[0487] In another specific embodiment, polypeptides, antibodies, polynucleotides and/or agonists or antagonists of the present invention are used to enhance or inhibit antibody dependent cellular cytotoxicity.

[0488] In another specific embodiment, polypeptides, antibodies, polynucleotides and/or agonists or antagonists of the present invention may also be employed for treating atherosclerosis, for example, by preventing monocyte infiltration in the artery wall.

[0489] In another specific embodiment, polypeptides, antibodies, polynucleotides and/or agonists or antagonists of the present invention may be employed to treat adult respiratory distress syndrome (ARDS).

[0490] In another specific embodiment, polypeptides, antibodies, polynucleotides and/or agonists or antagonists of the present invention may be useful for stimulating wound and tissue repair, stimulating angiogenesis, and/or stimulating the repair of vascular or lymphatic diseases or disorders. Additionally, agonists and antagonists of the invention may be used to stimulate the regeneration of mucosal surfaces.

[0491] In a specific embodiment, polynucleotides or polypeptides, and/or agonists thereof are used to diagnose, prognose, treat, and/or prevent a disorder characterized by primary or acquired immunodeficiency, deficient serum immunoglobulin production, recurrent infections, and/or immune system dysfunction. Moreover, polynucleotides or polypeptides, and/or agonists thereof may be used to treat or prevent infections of the joints, bones, skin, and/or parotid glands, blood-borne infections (e.g., sepsis, meningitis, septic arthritis, and/or osteomyelitis), autoimmune diseases (e.g., those disclosed herein), inflammatory disorders, and malignancies, and/or any disease or disorder or condition associated with these infections, diseases, disorders and/or malignancies) including, but not limited to, CVID, other primary immune deficiencies, HIV disease, CLL, recurrent bronchitis, sinusitis, otitis media, conjunctivitis, pneumonia, hepatitis, meningitis, herpes zoster (e.g., severe herpes zoster), and/or pneumocystis camii. Other diseases and disorders that may be prevented, diagnosed, prognosed, and/or treated with polynucleotides or polypeptides, and/or agonists of the present invention include, but are not limited to, HIV infection, HTLV-BLV infection, lymphopenia, phagocyte bactericidal dysfunction anemia, thrombocytopenia, and hemoglobinuria.

[0492] In another embodiment, polynucleotides, polypeptides, antibodies, and/or agonists or antagonists of the present invention are used to treat, and/or diagnose an individual having common variable immunodeficiency disease (“CVID”; also known as “acquired agammaglobulinemia” and “acquired hypogammaglobulinemia”) or a subset of this disease.

[0493] In a specific embodiment, polynucleotides, polypeptides, antibodies, and/or agonists or antagonists of the present invention may be used to diagnose, prognose, prevent, and/or treat cancers or neoplasms including immune cell or immune tissue-related cancers or neoplasms. Examples of cancers or neoplasms that may be prevented, diagnosed, or treated by polynucleotides, polypeptides, antibodies, and/or agonists or antagonists of the present invention include, but are not limited to, acute myelogenous leukemia, chronic myelogenous leukemia, Hodgkin's disease, non-Hodgkin's lymphoma, acute lymphocytic anemia (ALL) Chronic lymphocyte leukemia, plasmacytomas, multiple myeloma, Burkitt's lymphoma, EBV-transformed diseases, and/or diseases and disorders described in the section entitled “Hyperproliferative Disorders” elsewhere herein.

[0494] In another specific embodiment, polypeptides, antibodies, polynucleotides and/or agonists or antagonists of the present invention are used as a therapy for decreasing cellular proliferation of Large B-cell Lymphomas.

[0495] In another specific embodiment, polypeptides, antibodies, polynucleotides and/or agonists or antagonists of the present invention are used as a means of decreasing the involvement of B cells and Ig associated with Chronic Myelogenous Leukemia.

[0496] In specific embodiments, the compositions of the invention are used as an agent to boost immunoresponsiveness among B cell immunodeficient individuals, such as, for example, an individual who has undergone a partial or complete splenectomy.

[0497] Antagonists of the invention include, for example, binding and/or inhibitory antibodies, antisense nucleic acids, ribozymes or soluble forms of the polypeptides of the present invention (e.g., Fc fusion protein; see, e.g., Example 9). Agonists of the invention include, for example, binding or stimulatory antibodies, and soluble forms of the polypeptides (e.g., Fc fusion proteins; see, e.g., Example 9). Polypeptides, antibodies, polynucleotides and/or agonists or antagonists of the present invention may be employed in a composition with a pharmaceutically acceptable carrier, e.g., as described herein.

[0498] In another embodiment, polypeptides, antibodies, polynucleotides and/or agonists or antagonists of the present invention are administered to an animal (including, but not limited to, those listed above, and also including transgenic animals) incapable of producing functional endogenous antibody molecules or having an otherwise compromised endogenous immune system, but which is capable of producing human immunoglobulin molecules by means of a reconstituted or partially reconstituted immune system from another animal (see, e.g., published PCT Application Nos. WO98/24893, WO/9634096, WO/9633735, and WO/9110741). Administration of polypeptides, antibodies, polynucleotides and/or agonists or antagonists of the present invention to such animals is useful for the generation of monoclonal antibodies against the polypeptides, antibodies, polynucleotides and/or agonists or antagonists of the present invention.

[0499] Blood-Related Disorders

[0500] The polynucleotides, polypeptides, antibodies, and/or agonists or antagonists of the present invention may be used to modulate hemostatic (the stopping of bleeding) or thrombolytic (clot dissolving) activity. For example, by increasing hemostatic or thrombolytic activity, polynucleotides or polypeptides, and/or agonists or antagonists of the present invention could be used to treat or prevent blood coagulation diseases, disorders, and/or conditions (e.g., afibrinogenemia, factor deficiencies, hemophilia), blood platelet diseases, disorders, and/or conditions (e.g., thrombocytopenia), or wounds resulting from trauma, surgery, or other causes. Alternatively, polynucleotides, polypeptides, antibodies, and/or agonists or antagonists of the present invention that can decrease hemostatic or thrombolytic activity could be used to inhibit or dissolve clotting. These molecules could be important in the treatment or prevention of heart attacks (infarction), strokes, or scarring.

[0501] In specific embodiments, the polynucleotides, polypeptides, antibodies, and/or agonists or antagonists of the present invention may be used to prevent, diagnose, prognose, and/or treat thrombosis, arterial thrombosis, venous thrombosis, thromboembolism, pulmonary embolism, atherosclerosis, myocardial infarction, transient ischemic attack, unstable angina. In specific embodiments, the polynucleotides, polypeptides, antibodies, and/or agonists or antagonists of the present invention may be used for the prevention of occulsion of saphenous grafts, for reducing the risk of periprocedural thrombosis as might accompany angioplasty procedures, for reducing the risk of stroke in patients with atrial fibrillation including nonrheumatic atrial fibrillation, for reducing the risk of embolism associated with mechanical heart valves and or mitral valves disease. Other uses for the polynucleotides, polypeptides, antibodies, and/or agonists or antagonists of the present invention, include, but are not limited to, the prevention of occlusions in extrcorporeal devices (e.g., intravascular canulas, vascular access shunts in hemodialysis patients, hemodialysis machines, and cardiopulmonary bypass machines).

[0502] The polynucleotides, polypeptides, antibodies, and/or agonists or antagonists of the present invention may be used to modulate hematopoietic activity (the formation of blood cells). For example, the polynucleotides, polypeptides, antibodies, and/or agonists or antagonists of the present invention may be used to increase the quantity of all or subsets of blood cells, such as, for example, erythrocytes, lymphocytes (B or T cells), myeloid cells (e.g., basophils, eosinophils, neutrophils, mast cells, macrophages) and platelets. The ability to decrease the quantity of blood cells or subsets of blood cells may be useful in the prevention, detection, diagnosis and/or treatment of anemias and leukopenias described below. Alternatively, the polynucleotides, polypeptides, antibodies, and/or agonists or antagonists of the present invention may be used to decrease the quantity of all or subsets of blood cells, such as, for example, erythrocytes, lymphocytes (B or T cells), myeloid cells (e.g., basophils, eosinophils, neutrophils, mast cells, macrophages) and platelets.. The ability to decrease the quantity of blood cells or subsets of blood cells may be useful in the prevention, detection, diagnosis and/or treatment of leukocytoses, such as, for example eosinophilia.

[0503] The polynucleotides, polypeptides, antibodies, and/or agonists or antagonists of the present invention may be used to prevent, treat, or diagnose blood dyscrasia.

[0504] Anemias are conditions in which the number of red blood cells or amount of hemoglobin (the protein that carries oxygen) in them is below normal. Anemia may be caused by excessive bleeding, decreased red blood cell production, or increased red blood cell destruction (hemolysis). The polynucleotides, polypeptides, antibodies, and/or agonists or antagonists of the present invention may be useful in treating, preventing, and/or diagnosing anemias. Anemias that may be treated prevented or diagnosed by the polynucleotides, polypeptides, antibodies, and/or agonists or antagonists of the present invention include iron deficiency anemia, hypochromic anemia, microcytic anemia, chlorosis, hereditary siderob;astic anemia, idiopathic acquired sideroblastic anemia, red cell aplasia, megaloblastic anemia (e.g., pernicious anemia, (vitamin B12 deficiency) and folic acid deficiency anemia), aplastic anemia, hemolytic anemias (e.g., autoimmune helolytic anemia, microangiopathic hemolytic anemia, and paroxysmal nocturnal hemoglobinuria). The polynucleotides, polypeptides, antibodies, and/or agonists or antagonists of the present invention may be useful in treating, preventing, and/or diagnosing anemias associated with diseases including but not limited to, anemias associated with systemic lupus erythematosus, cancers, lymphomas, chronic renal disease, and enlarged spleens. The polynucleotides, polypeptides, antibodies, and/or agonists or antagonists of the present invention may be useful in treating, preventing, and/or diagnosing anemias arising from drug treatments such as anemias associated with methyldopa, dapsone, and/or sulfadrugs. Additionally, the polynucleotides, polypeptides, antibodies, and/or agonists or antagonists of the present invention may be useful in treating, preventing, and/or diagnosing anemias associated with abnormal red blood cell architecture including but not limited to, hereditary spherocytosis, hereditary elliptocytosis, glucose-6-phosphate dehydrogenase deficiency, and sickle cell anemia.

[0505] The polynucleotides, polypeptides, antibodies, and/or agonists or antagonists of the present invention may be useful in treating, preventing, and/or diagnosing hemoglobin abnormalities, (e.g., those associated with sickle cell anemia, hemoglobin C disease, hemoglobin S-C disease, and hemoglobin E disease). Additionally, the polynucleotides, polypeptides, antibodies, and/or agonists or antagonists of the present invention may be useful in diagnosing, prognosing, preventing, and/or treating thalassemias, including, but not limited to major and minor forms of alpha-thalassemia and beta-thalassemia.

[0506] In another embodiment, the polynucleotides, polypeptides, antibodies, and/or agonists or antagonists of the present invention may be useful in diagnosing, prognosing, preventing, and/or treating bleeding disorders including, but not limited to, thrombocytopenia (e.g., idiopathic thrombocytopenic purpura, and thrombotic thrombocytopenic purpura), Von Willebrand's disease, hereditary platelet disorders (e.g., storage pool disease such as Chediak-Higashi and Hermansky-Pudlak syndromes, thromboxane A2 dysfunction, thromboasthenia, and Bemard-Soulier syndrome), hemolytic-uremic syndrome, hemophelias such as hemophelia A or Factor VII deficiency and Christmas disease or Factor IX deficiency, Hereditary Hemorhhagic Telangiectsia, also known as Rendu-Osler-Weber syndrome, allergic purpura (Henoch Schonlein purpura) and disseminated intravascular coagulation.

[0507] The effect of the polynucleotides, polypeptides, antibodies, and/or agonists or antagonists of the present invention on the clotting time of blood may be monitored using any of the clotting tests known in the art including, but not limited to, whole blood partial thromboplastin time (PTT), the activated partial thromboplastin time (aPTT), the activated clotting time (ACT), the recalcified activated clotting time, or the Lee-White Clotting time.

[0508] Several diseases and a variety of drugs can cause platelet dysfunction. Thus, in a specific embodiment, the polynucleotides, polypeptides, antibodies, and/or agonists or antagonists of the present invention may be useful in diagnosing, prognosing, preventing, and/or treating acquired platelet dysfunction such as platelet dysfunction accompanying kidney failure, leukemia, multiple myeloma, cirrhosis of the liver, and systemic lupus erythematosus as well as platelet dysfunction associated with drug treatments, including treatment with aspirin, ticlopidine, nonsteroidal anti-inflammatory drugs (used for arthritis, pain, and sprains), and penicillin in high doses.

[0509] In another embodiment, the polynucleotides, polypeptides, antibodies, and/or agonists or antagonists of the present invention may be useful in diagnosing, prognosing, preventing, and/or treating diseases and disorders characterized by or associated with increased or decreased numbers of white blood cells. Leukopenia occurs when the number of white blood cells decreases below normal. Leukopenias include, but are not limited to, neutropenia and lymphocytopenia. An increase in the number of white blood cells compared to normal is known as leukocytosis. The body generates increased numbers of white blood cells during infection. Thus, leukocytosis may simply be a normal physiological parameter that reflects infection. Alternatively, leukocytosis may be an indicator of injury or other disease such as cancer. Leokocytoses, include but are not limited to, eosinophilia, and accumulations of macrophages. In specific embodiments, the polynucleotides, polypeptides, antibodies, and/or agonists or antagonists of the present invention may be useful in diagnosing, prognosing, preventing, and/or treating leukopenia. In other specific embodiments, the polynucleotides, polypeptides, antibodies, and/or agonists or antagonists of the present invention may be useful in diagnosing, prognosing, preventing, and/or treating leukocytosis

[0510] Leukopenia may be a generalized decreased in all types of white blood cells, or may be a specific depletion of particular types of white blood cells. Thus, in specific embodiments, the polynucleotides, polypeptides, antibodies, and/or agonists or antagonists of the present invention may be useful in diagnosing, prognosing, preventing, and/or treating decreases in neutrophil numbers, known as neutropenia. Neutropenias that may be diagnosed, prognosed, prevented, and/or treated by the polynucleotides, polypeptides, antibodies, and/or agonists or antagonists of the present invention include, but are not limited to, infantile genetic agranulocytosis, familial neutropenia, cyclic neutropenia, neutropenias resulting from or associated with dietary deficiencies (e.g., vitamin B 12 deficiency or folic acid deficiency), neutropenias resulting from or associated with drug treatments (e.g., antibiotic regimens such as penicillin treatment, sulfonamide treatment, anticoagulant treatment, anticonvulsant drugs, anti-thyroid drugs, and cancer chemotherapy), and neutropenias resulting from increased neutrophil destruction that may occur in association with some bacterial or viral infections, allergic disorders, autoimmune diseases, conditions in which an individual has an enlarged spleen (e.g., Felty syndrome, malaria and sarcoidosis), and some drug treatment regimens.

[0511] The polynucleotides, polypeptides, antibodies, and/or agonists or antagonists of the present invention may be useful in diagnosing, prognosing, preventing, and/or treating lymphocytopenias (decreased numbers of B and/or T lymphocytes), including, but not limited lymphocytopenias resulting from or associated with stress, drug treatments (e.g., drug treatment with corticosteroids, cancer chemotherapies, and/or radiation therapies), AIDS infection and/or other diseases such as, for example, cancer, rheumatoid arthritis, systemic lupus erythematosus, chronic infections, some viral infections and/or hereditary disorders (e.g., DiGeorge syndrome, Wiskott-Aldrich Syndome, severe combined immunodeficiency, ataxia telangiectsia).

[0512] The polynucleotides, polypeptides, antibodies, and/or agonists or antagonists of the present invention may be useful in diagnosing, prognosing, preventing, and/or treating diseases and disorders associated with macrophage numbers and/or macrophage function including, but not limited to, Gaucher's disease, Niemann-Pick disease, Letterer-Siwe disease and Hand-Schuller-Christian disease.

[0513] In another embodiment, the polynucleotides, polypeptides, antibodies, and/or agonists or antagonists of the present invention may be useful in diagnosing, prognosing, preventing, and/or treating diseases and disorders associated with eosinophil numbers and/or eosinophil function including, but not limited to, idiopathic hypereosinophilic syndrome, eosinophilia-myalgia syndrome, and Hand-Schuller-Christian disease.

[0514] In yet another embodiment, the polynucleotides, polypeptides, antibodies, and/or agonists or antagonists of the present invention may be useful in diagnosing, prognosing, preventing, and/or treating leukemias and lymphomas including, but not limited to, acute lymphocytic (lymphpblastic) leukemia (ALL), acute myeloid (myelocytic, myelogenous, myeloblastic, or myelomonocytic) leukemia, chronic lymphocytic leukemia (e.g., B cell leukemias, T cell leukemias, Sezary syndrome, and Hairy cell leukenia), chronic myelocytic (myeloid, myelogenous, or granulocytic) leukemia, Hodgkin's lymphoma, non-hodgkin's lymphoma, Burkitt's lymphoma, and mycosis fungoides.

[0515] In other embodiments, the polynucleotides, polypeptides, antibodies, and/or agonists or antagonists of the present invention may be useful in diagnosing, prognosing, preventing, and/or treating diseases and disorders of plasma cells including, but not limited to, plasma cell dyscrasias, monoclonal gammaopathies, monoclonal gammopathies of undetermined significance, multiple myeloma, macroglobulinemia, Waldenstrom's macroglobulinemia, cryoglobulinemia, and Raynaud's phenomenon.

[0516] In other embodiments, the polynucleotides, polypeptides, antibodies, and/or agonists or antagonists of the present invention may be useful in treating, preventing, and/or diagnosing myeloproliferative disorders, including but not limited to, polycythemia vera, relative polycythemia, secondary polycythemia, myelofibrosis, acute myelofibrosis, agnogenic myelod metaplasia, thrombocythemia, (including both primary and seconday thrombocythemia) and chronic myelocytic leukemia.

[0517] In other embodiments, the polynucleotides, polypeptides, antibodies, and/or agonists or antagonists of the present invention may be useful as a treatment prior to surgery, to increase blood cell production.

[0518] In other embodiments, the polynucleotides, polypeptides, antibodies, and/or agonists or antagonists of the present invention may be useful as an agent to enhance the migration, phagocytosis, superoxide production, antibody dependent cellular cytotoxicity of neutrophils, eosionophils and macrophages.

[0519] In other embodiments, the polynucleotides, polypeptides, antibodies, and/or agonists or antagonists of the present invention may be useful as an agent to increase the number of stem cells in circulation prior to stem cells pheresis. In another specific embodiment, the polynucleotides, polypeptides, antibodies, and/or agonists or antagonists of the present invention may be useful as an agent to increase the number of stem cells in circulation prior to platelet pheresis.

[0520] In other embodiments, the polynucleotides, polypeptides, antibodies, and/or agonists or antagonists of the present invention may be useful as an agent to increase cytokine production.

[0521] In other embodiments, the polynucleotides, polypeptides, antibodies, and/or agonists or antagonists of the present invention may be useful in preventing, diagnosing, and/or treating primary hematopoietic disorders.

[0522] Hyperproliferative Disorders

[0523] Colorectal cancer associated polynucleotides or polypeptides, or agonists or antagonists thereof, can be used to treat, prevent, diagnose and/or prognose hyperproliferative diseases, disorders, and/or conditions, including neoplasms.

[0524] In a specific embodiment, colorectal cancer associated polynucleotides or polypeptides, or agonists or antagonists thereof, can be used to treat, prevent, and/or diagnose hyperproliferative diseases, disorders, and/or conditions of the colon and/or rectum.

[0525] In a preferred embodiment, colorectal cancer associated polynucleotides or polypeptides, or agonists or antagonists thereof, can be used to treat, prevent, and/or diagnose colorectal neoplasms.

[0526] Colorectal cancer associated polynucleotides or polypeptides, or agonists or antagonists of the invention, may inhibit the proliferation of the disorder through direct or indirect interactions. Alternatively, colorectal cancer associated polynucleotides or polypeptides, or agonists or antagonists thereof, may proliferate other cells, which can inhibit the hyperproliferative disorder.

[0527] For example, by increasing an immune response, particularly increasing antigenic qualities of the hyperproliferative disorder or by proliferating, differentiating, or mobilizing T-cells, hyperproliferative diseases, disorders, and/or conditions can be treated, prevented, and/or diagnosed. This immune response may be increased by either enhancing an existing immune response, or by initiating a new immune response. Alternatively, decreasing an immune response may also be a method of treating, preventing, and/or diagnosing hyperproliferative diseases, disorders, and/or conditions, such as a chemotherapeutic agent.

[0528] Examples of hyperproliferative diseases, disorders, and/or conditions that can be treated, prevented, and/or diagnosed by colorectal cancer associated polynucleotides or polypeptides, or agonists or antagonists thereof, include, but are not limited to neoplasms located in the: prostate, colon, abdomen, bone, breast, digestive system, liver, pancreas, peritoneum, endocrine glands (adrenal, parathyroid, pituitary, testicles, ovary, thymus, thyroid), eye, head and neck, nervous (central and peripheral), lymphatic system, pelvic, skin, soft tissue, spleen, thoracic, and urogenital.

[0529] Similarly, other hyperproliferative disorders can also be treated or detected by polynucleotides or polypeptides, or agonists or antagonists of the present invention. Examples of such hyperproliferative disorders include, but are not limited to: Acute Childhood Lymphoblastic Leukemia, Acute Lymphoblastic Leukemia, Acute Lymphocytic Leukemia, Acute Myeloid Leukemia, Adrenocortical Carcinoma, Adult (Primary) Hepatocellular Cancer, Adult (Primary) Liver Cancer, Adult Acute Lymphocytic Leukemia, Adult Acute Myeloid Leukemia, Adult Hodgkin's Disease, Adult Hodgkin's Lymphoma, Adult Lymphocytic Leukemia, Adult Non-Hodgkin's Lymphoma, Adult Primary Liver Cancer, Adult Soft Tissue Sarcoma, AIDS-Related Lymphoma, AIDS-Related Malignancies, Anal Cancer, Astrocytoma, Bile Duct Cancer, Bladder Cancer, Bone Cancer, Brain Stem Glioma, Brain Tumors, Breast Cancer, Cancer of the Renal Pelvis and Ureter, Central Nervous System (Primary) Lymphoma, Central Nervous System Lymphoma, Cerebellar Astrocytoma, Cerebral Astrocytoma, Cervical Cancer, Childhood (Primary) Hepatocellular Cancer, Childhood (Primary) Liver Cancer, Childhood Acute Lymphoblastic Leukemia, Childhood Acute Myeloid Leukemia, Childhood Brain Stem Glioma, Childhood Cerebellar Astrocytoma, Childhood Cerebral Astrocytoma, Childhood Extracranial Germ Cell Tumors, Childhood Hodgkin's Disease, Childhood Hodgkin's Lymphoma, Childhood Hypothalamic and Visual Pathway Glioma, Childhood Lymphoblastic Leukemia, Childhood Medulloblastoma, Childhood Non-Hodgkin's Lymphoma, Childhood Pineal and Supratentorial Primitive Neuroectodermal Tumors, Childhood Primary Liver Cancer, Childhood Rhabdomyosarcoma, Childhood Soft Tissue Sarcoma, Childhood Visual Pathway and Hypothalamic Glioma, Chronic Lymphocytic Leukemia, Chronic Myelogenous Leukemia, Colon Cancer, Cutaneous T-Cell Lymphoma, Endocrine Pancreas Islet Cell Carcinoma, Endometrial Cancer, Ependymoma, Epithelial Cancer, Esophageal Cancer, Ewing's Sarcoma and Related Tumors, Exocrine Pancreatic Cancer, Extracranial Germ Cell Tumor, Extragonadal Germ Cell Tumor, Extrahepatic Bile Duct Cancer, Eye Cancer, Female Breast Cancer, Gaucher's Disease, Gallbladder Cancer, Gastric Cancer, Gastrointestinal Carcinoid Tumor, Gastrointestinal Tumors, Germ Cell Tumors, Gestational Trophoblastic Tumor, Hairy Cell Leukemia, Head and Neck Cancer, Hepatocellular Cancer, Hodgkin's Disease, Hodgkin's Lymphoma, Hypergammaglobulinemia, Hypopharyngeal Cancer, Intestinal Cancers, Intraocular Melanoma, Islet Cell Carcinoma, Islet Cell Pancreatic Cancer, Kaposi's Sarcoma, Kidney Cancer, Laryngeal Cancer, Lip and Oral Cavity Cancer, Liver Cancer, Lung Cancer, Lymphoproliferative Disorders, Macroglobulinemia, Male Breast Cancer, Malignant Mesothelioma, Malignant Thymoma, Medulloblastoma, Melanoma, Mesothelioma, Metastatic Occult Primary Squamous Neck Cancer, Metastatic Primary Squamous Neck Cancer, Metastatic Squamous Neck Cancer, Multiple Myeloma, Multiple Myeloma/Plasma Cell Neoplasm, Myelodysplastic Syndrome, Myelogenous Leukemia, Myeloid Leukemia, Myeloproliferative Disorders, Nasal Cavity and Paranasal Sinus Cancer, Nasopharyngeal Cancer, Neuroblastoma, Non-Hodgkin's Lymphoma During Pregnancy, Nonmelanoma Skin Cancer, Non-Small Cell Lung Cancer, Occult Primary Metastatic Squamous Neck Cancer, Oropharyngeal Cancer, Osteo-/Malignant Fibrous Sarcoma, Osteosarcoma/Malignant Fibrous Histiocytoma, Osteosarcoma/Malignant Fibrous Histiocytoma of Bone, Ovarian Epithelial Cancer, Ovarian Germ Cell Tumor, Ovarian Low Malignant Potential Tumor, Pancreatic Cancer, Paraproteinemias, Purpura, Parathyroid Cancer, Penile Cancer, Pheochromocytoma, Pituitary Tumor, Plasma Cell Neoplasm/Multiple Myeloma, Primary Central Nervous System Lymphoma, Primary Liver Cancer, Prostate Cancer, Rectal Cancer, Renal Cell Cancer, Renal Pelvis and Ureter Cancer, Retinoblastoma, Rhabdomyosarcoma, Salivary Gland Cancer, Sarcoidosis Sarcomas, Sezary Syndrome, Skin Cancer, Small Cell Lung Cancer, Small Intestine Cancer, Soft Tissue Sarcoma, Squamous Neck Cancer, Stomach Cancer, Supratentorial Primitive Neuroectodermal and Pineal Tumors, T-Cell Lymphoma, Testicular Cancer, Thymoma, Thyroid Cancer, Transitional Cell Cancer of the Renal Pelvis and Ureter, Transitional Renal Pelvis and Ureter Cancer, Trophoblastic Tumors, Ureter and Renal Pelvis Cell Cancer, Urethral Cancer, Uterine Cancer, Uterine Sarcoma, Vaginal Cancer, Visual Pathway and Hypothalamic Glioma, Vulvar Cancer, Waldenstrom's Macroglobulinernia, Wilms' Tumor, and any other hyperproliferative disease, besides neoplasia, located in an organ system listed above.

[0530] In another preferred embodiment, polynucleotides or polypeptides, or agonists or antagonists of the present invention are used to diagnose, prognose, prevent, and/or treat premalignant conditions and to prevent progression to a neoplastic or malignant state, including but not limited to those disorders described above. Such uses are indicated in conditions known or suspected of preceding progression to neoplasia or cancer, in particular, where non-neoplastic cell growth consisting of hyperplasia, metaplasia, or most particularly, dysplasia has occurred (for review of such abnormal growth conditions, see Robbins and Angell, 1976, Basic Pathology, 2d Ed., W. B. Saunders Co., Philadelphia, pp. 68-79.)

[0531] Hyperplasia is a form of controlled cell proliferation, involving an increase in cell number in a tissue or organ, without significant alteration in structure or function. Hyperplastic disorders which can be diagnosed, prognosed, prevented, and/or treated with compositions of the invention (including polynucleotides, polypeptides, agonists or antagonists) include, but are not limited to, angiofollicular mediastinal lymph node hyperplasia, angiolymphoid hyperplasia with eosinophilia, atypical melanocytic hyperplasia, basal cell hyperplasia, benign giant lymph node hyperplasia, cementum hyperplasia, congenital adrenal hyperplasia, congenital sebaceous hyperplasia, cystic hyperplasia, cystic hyperplasia of the breast, denture hyperplasia, ductal hyperplasia, endometrial hyperplasia, fibromuscular hyperplasia, focal epithelial hyperplasia, gingival hyperplasia, inflammatory fibrous hyperplasia, inflammatory papillary hyperplasia, intravascular papillary endothelial hyperplasia, nodular hyperplasia of prostate, nodular regenerative hyperplasia, pseudoepitheliomatous hyperplasia, senile sebaceous hyperplasia, and verrucous hyperplasia.

[0532] Metaplasia is a form of controlled cell growth in which one type of adult or fully differentiated cell substitutes for another type of adult cell. Metaplastic disorders which can be diagnosed, prognosed, prevented, and/or treated with compositions of the invention (including polynucleotides, polypeptides, agonists or antagonists) include, but are not limited to, agnogenic myeloid metaplasia, apocrine metaplasia, atypical metaplasia, autoparenchymatous metaplasia, connective tissue metaplasia, epithelial metaplasia, intestinal metaplasia, metaplastic anemia, metaplastic ossification, metaplastic polyps, myeloid metaplasia, primary myeloid metaplasia, secondary myeloid metaplasia, squamous metaplasia, squamous metaplasia of amnion, and symptomatic myeloid metaplasia.

[0533] Dysplasia is frequently a forerunner of cancer, and is found mainly in the epithelia; it is the most disorderly form of non-neoplastic cell growth, involving a loss in individual cell uniformity and in the architectural orientation of cells. Dysplastic cells often have abnormally large, deeply stained nuclei, and exhibit pleomorphism. Dysplasia characteristically occurs where there exists chronic irritation or inflammation. Dysplastic disorders which can be diagnosed, prognosed, prevented, and/or treated with compositions of the invention (including polynucleotides, polypeptides, agonists or antagonists) include, but are not limited to, anhidrotic ectodermal dysplasia, anterofacial dysplasia, asphyxiating thoracic dysplasia, atriodigital dysplasia, bronchopulmonary dysplasia, cerebral dysplasia, cervical dysplasia, chondroectodermal dysplasia, cleidocranial dysplasia, congenital ectodermal dysplasia, craniodiaphysial dysplasia, craniocarpotarsal dysplasia, craniometaphysial dysplasia, dentin dysplasia, diaphysial dysplasia, ectodermal dysplasia, enamel dysplasia, encephalo-ophthalmic dysplasia, dysplasia epiphysialis hemimelia, dysplasia epiphysialis multiplex, dysplasia epiphysialis punctata, epithelial dysplasia, faciodigitogenital dysplasia, familial fibrous dysplasia of jaws, familial white folded dysplasia, fibromuscular dysplasia, fibrous dysplasia of bone, florid osseous dysplasia, hereditary renal-retinal dysplasia, hidrotic ectodermal dysplasia, hypohidrotic ectodermal dysplasia, lymphopenic thymic dysplasia, mammary dysplasia, mandibulofacial dysplasia, metaphysial dysplasia, Mondini dysplasia, monostotic fibrous dysplasia, mucoepithelial dysplasia, multiple epiphysial dysplasia, oculoauriculovertebral dysplasia, oculodentodigital dysplasia, oculovertebral dysplasia, odontogenic dysplasia, ophthalmomandibulomelic dysplasia, periapical cemental dysplasia, polyostotic fibrous dysplasia, pseudoachondroplastic spondyloepiphysial dysplasia, retinal dysplasia, septo-optic dysplasia, spondyloepiphysial dysplasia, and ventriculoradial dysplasia.

[0534] Additional pre-neoplastic disorders which can be diagnosed, prognosed, prevented, and/or treated with compositions of the invention (including polynucleotides, polypeptides, agonists or antagonists) include, but are not limited to, benign dysproliferative disorders (e.g., benign tumors, fibrocystic conditions, tissue hypertrophy, intestinal polyps, colon polyps, and esophageal dysplasia), leukoplakia, keratoses, Bowen's disease, Farmer's Skin, solar cheilitis, and solar keratosis.

[0535] In another embodiment, polynucleotides, polypeptides, antibodies, and/or agonists or antagonists of the present invention conjugated to a toxin or a radioactive isotope, as described herein, may be used to treat cancers and neoplasms, including, but not limited to those described herein. In a further preferred embodiment, polynucleotides, polypeptides, antibodies, and/or agonists or antagonists of the present invention conjugated to a toxin or a radioactive isotope, as described herein, may be used to treat acute myelogenous leukemia.

[0536] Additionally, polynucleotides, polypeptides, and/or agonists or antagonists of the invention may affect apoptosis, and therefore, would be useful in treating a number of diseases associated with increased cell survival or the inhibition of apoptosis. For example, diseases associated with increased cell survival or the inhibition of apoptosis that could be diagnosed, prognosed, prevented, and/or treated by polynucleotides, polypeptides, and/or agonists or antagonists of the invention, include cancers (such as follicular lymphomas, carcinomas with p53 mutations, and hormone-dependent tumors, including, but not limited to colon cancer, cardiac tumors, pancreatic cancer, melanoma, retinoblastoma, glioblastoma, lung cancer, intestinal cancer, testicular cancer, stomach cancer, neuroblastoma, myxoma, myoma, lymphoma, endothelioma, osteoblastoma, osteoclastoma, osteosarcoma, chondrosarcoma, adenoma, breast cancer, prostate cancer, Kaposi's sarcoma and ovarian cancer); autoimmune disorders such as, multiple sclerosis, Sjogren's syndrome, Hashimoto's thyroiditis, biliary cirrhosis, Behcet's disease, Crohn's disease, polymyositis, systemic lupus erythematosus and immune-related glomerulonephritis and rheumatoid arthritis) and viral infections (such as herpes viruses, pox viruses and adenoviruses), inflammation, graft v. host disease, acute graft rejection, and chronic graft rejection.

[0537] In preferred embodiments, polynucleotides, polypeptides, and/or agonists or antagonists of the invention are used to inhibit growth, progression, and/or metastasis of cancers, in particular those listed above.

[0538] Additional diseases or conditions associated with increased cell survival that could be diagnosed, prognosed, prevented, and/or treated by polynucleotides, polypeptides, and/or agonists or antagonists of the invention, include, but are not limited to, progression, and/or metastases of malignancies and related disorders such as leukemia (including acute leukemias (e.g., acute lymphocytic leukemia, acute myelocytic leukemia (including myeloblastic, promyelocytic, myelomonocytic, monocytic, and erythroleukemia)) and chronic leukemias (e.g., chronic myelocytic (granulocytic) leukemia and chronic lymphocytic leukemia)), polycythemia vera, lymphomas (e.g., Hodgkin's disease and non-Hodgkin's disease), multiple myeloma, Waldenstrom's macroglobulinemia, heavy chain disease, and solid tumors including, but not limited to, sarcomas and carcinomas such as fibrosarcoma, myxosarcoma, liposarcoma, chondrosarcoma, osteogenic sarcoma, chordoma, angiosarcoma, endotheliosarcoma, lymphangiosarcoma, lymphangioendotheliosarcoma, synovioma, mesothelioma, Ewing's tumor, leiomyosarcoma, rhabdomyosarcoma, colon carcinoma, pancreatic cancer, breast cancer, ovarian cancer, prostate cancer, squamous cell carcinoma, basal cell carcinoma, adenocarcinoma, sweat gland carcinoma, sebaceous gland carcinoma, papillary carcinoma, papillary adenocarcinomas, cystadenocarcinoma, medullary carcinoma, bronchogenic carcinoma, renal cell carcinoma, hepatoma, bile duct carcinoma, choriocarcinoma, seminoma, embryonal carcinoma, Wilm's tumor, cervical cancer, testicular tumor, lung carcinoma, small cell lung carcinoma, bladder carcinoma, epithelial carcinoma, glioma, astrocytoma, medulloblastoma, craniopharyngioma, ependymoma, pinealoma, emangioblastoma, acoustic neuroma, oligodendroglioma, menangioma, melanoma, neuroblastoma, and retinoblastoma.

[0539] Diseases associated with increased apoptosis that could be diagnosed, prognosed, prevented, and/or treated by polynucleotides, polypeptides, and/or agonists or antagonists of the invention, include AIDS; neurodegenerative disorders (such as Alzheimer's disease, Parkinson's disease, amyotrophic lateral sclerosis, retinitis pigmentosa, cerebellar degeneration and brain tumor or prior associated disease); autoimmune disorders (such as, multiple sclerosis, Sjogren's syndrome, Hashimoto's thyroiditis, biliary cirrhosis, Behcet's disease, Crohn's disease, polymyositis, systemic lupus erythematosus and immune-related glomerulonephritis and rheumatoid arthritis) myelodysplastic syndromes (such as aplastic anemia), graft v. host disease, ischemic injury (such as that caused by myocardial infarction, stroke and reperfusion injury), liver injury (e.g., hepatitis related liver injury, ischemia/reperfusion injury, cholestosis (bile duct injury) and liver cancer); toxin-induced liver disease (such as that caused by alcohol), septic shock, cachexia and anorexia.

[0540] Hyperproliferative diseases and/or disorders that could be diagnosed, prognosed, prevented, and/or treated by polynucleotides, polypeptides, and/or agonists or antagonists of the invention, include, but are not limited to, neoplasms located in the liver, abdomen, bone, breast, digestive system, pancreas, peritoneum, endocrine glands (adrenal, parathyroid, pituitary, testicles, ovary, thymus, thyroid), eye, head and neck, nervous system (central and peripheral), lymphatic system, pelvis, skin, soft tissue, spleen, thorax, and urogenital tract.

[0541] Similarly, other hyperproliferative disorders can also be diagnosed, prognosed, prevented, and/or treated by polynucleotides, polypeptides, and/or agonists or antagonists of the invention. Examples of such hyperproliferative disorders include, but are not limited to: hypergammaglobulinemia, lymphoproliferative disorders, paraproteinemias, purpura, sarcoidosis, Sezary Syndrome, Waldenstron's macroglobulinemia, Gaucher's Disease, histiocytosis, and any other hyperproliferative disease, besides neoplasia, located in an organ system listed above.

[0542] One preferred embodiment utilizes polynucleotides of the present invention to inhibit aberrant cellular division, by gene therapy using the present invention, and/or protein fusions or fragments thereof.

[0543] Thus, the present invention provides a method for treating cell proliferative diseases, disorders, and/or conditions by inserting into an abnormally proliferating cell a polynucleotide of the present invention, wherein said polynucleotide represses said cell proliferation, disease, disorder, and/or condition.

[0544] In a preferred embodiment, the present invention provides a method for treating cell proliferative diseases, disorders and/or conditions of the colorectal cancer by inserting into a cell, a polynucleotide of the present invention, wherein said polynucleotide represses said cell proliferation, disease and/or disorder.

[0545] Another embodiment of the present invention provides a method of treating cell-proliferative diseases, disorders, and/or conditions in individuals comprising administration of one or more active gene copies of the present invention to an abnormally proliferating cell or cells. In a preferred embodiment, polynucleotides of the present invention is a DNA construct comprising a recombinant expression vector effective in expressing a DNA sequence encoding said polynucleotides. In another preferred embodiment of the present invention, the DNA construct encoding the polynucleotides of the present invention is inserted into cells to be treated utilizing a retrovirus, or more preferably an adenoviral vector (see, e.g., G J. Nabel, et. al., PNAS 96: 324-326 (1999), which is hereby incorporated by reference). In a most preferred embodiment, the viral vector is defective and will not transform non-proliferating cells, only proliferating cells. Moreover, in a preferred embodiment, the polynucleotides of the present invention inserted into proliferating cells either alone, or in combination with or fused to other polynucleotides, can then be modulated via an external stimulus (i.e., magnetic, specific small molecule, chemical, or drug administration, etc.), which acts upon the promoter upstream of said polynucleotides to induce expression of the encoded protein product. As such the beneficial therapeutic affect of the present invention may be expressly modulated (i.e., to increase, decrease, or inhibit expression of the present invention) based upon said external stimulus.

[0546] Polynucleotides of the present invention may be useful in repressing expression of oncogenic genes or antigens. By “repressing expression of the oncogenic genes” is intended the suppression of the transcription of the gene, the degradation of the gene transcript (pre-message RNA), the inhibition of splicing, the destruction of the messenger RNA, the prevention of the post-translational modifications of the protein, the destruction of the protein, or the inhibition of the normal function of the protein.

[0547] For local administration to abnormally proliferating cells, polynucleotides of the present invention may be administered by any method known to those of skill in the art including, but not limited to transfection, electroporation, microinjection of cells, or in vehicles such as liposomes, lipofectin, or as naked polynucleotides, or any other method described throughout the specification. The polynucleotide of the present invention may be delivered by known gene delivery systems such as, but not limited to, retroviral vectors (Gilboa, J. Virology 44:845 (1982); Hocke, Nature 320:275 (1986); Wilson, et al., Proc. Natl. Acad. Sci. U.S.A. 85:3014), vaccinia virus system (Chakrabarty et al., Mol. Cell Biol. 5:3403 (1985) or other efficient DNA delivery systems (Yates et al., Nature 313:812 (1985)) known to those skilled in the art. These references are exemplary only and are hereby incorporated by reference. In order to specifically deliver or transfect cells which are abnormally proliferating and spare non-dividing cells, it is preferable to utilize a retrovirus, or adenoviral (as described in the art and elsewhere herein) delivery system known to those of skill in the art. Since host DNA replication is required for retroviral DNA to integrate and the retrovirus will be unable to self replicate due to the lack of the retrovirus genes needed for its life cycle. Utilizing such a retroviral delivery system for polynucleotides of the present invention will target said gene and constructs to abnormally proliferating cells and will spare the non-dividing normal cells.

[0548] The polynucleotides of the present invention may be delivered directly to cell proliferative disorder/disease sites in internal organs, body cavities and the like by use of imaging devices used to guide an injecting needle directly to the disease site. The polynucleotides of the present invention may also be administered to disease sites at the time of surgical intervention.

[0549] By “cell proliferative disease” is meant any human or animal disease or disorder, affecting any one or any combination of organs, cavities, or body parts, which is characterized by single or multiple local abnormal proliferations of cells, groups of cells, or tissues, whether benign or malignant.

[0550] Any amount of the polynucleotides of the present invention may be administered as long as it has a biologically inhibiting effect on the proliferation of the treated cells. Moreover, it is possible to administer more than one of the polynucleotide of the present invention simultaneously to the same site. By “biologically inhibiting” is meant partial or total growth inhibition as well as decreases in the rate of proliferation or growth of the cells. The biologically inhibitory dose may be determined by assessing the effects of the polynucleotides of the present invention on target malignant or abnormally proliferating cell growth in tissue culture, tumor growth in animals and cell cultures, or any other method known to one of ordinary skill in the art.

[0551] The present invention is further directed to antibody-based therapies which involve administering of anti-polypeptides and anti-polynucleotide antibodies to a mammalian, preferably human, patient for treating one or more of the described diseases, disorders, and/or conditions. Methods for producing anti-polypeptides and anti-polynucleotide antibodies polyclonal and monoclonal antibodies are described in detail elsewhere herein. Such antibodies may be provided in pharmaceutically acceptable compositions as known in the art or as described herein.

[0552] A summary of the ways in which the antibodies of the present invention may be used therapeutically includes binding polynucleotides or polypeptides of the present invention locally or systemically in the body or by direct cytotoxicity of the antibody, e.g., as mediated by complement (CDC) or by effector cells (ADCC). Some of these approaches are described in more detail below. Armed with the teachings provided herein, one of ordinary skill in the art will know how to use the antibodies of the present invention for diagnostic, monitoring or therapeutic purposes without undue experimentation.

[0553] In particular, the antibodies, fragments and derivatives of the present invention are useful for treating a subject having or developing cell proliferative and/or differentiation diseases, disorders, and/or conditions as described herein. Such treatment comprises administering a single or multiple doses of the antibody, or a fragment, derivative, or a conjugate thereof.

[0554] The antibodies of this invention may be advantageously utilized in combination with other monoclonal or chimeric antibodies, or with lymphokines or hematopoietic growth factors, for example, which serve to increase the number or activity of effector cells which interact with the antibodies.

[0555] It is preferred to use high affinity and/or potent in vivo inhibiting and/or neutralizing antibodies against polypeptides or polynucleotides of the present invention, fragments or regions thereof, for both immunoassays directed to and therapy of diseases, disorders, and/or conditions related to polynucleotides or polypeptides, including fragments thereof, of the present invention. Such antibodies, fragments, or regions, will preferably have an affinity for polynucleotides or polypeptides, including fragments thereof. Preferred binding affinities include those with a dissociation constant or Kd less than 5×10⁻⁶M, 10⁻⁶M, 5×10⁻⁷M, 10⁻⁷M, 5×10⁻⁸M, 10⁻⁸M, 5×10⁻⁹M, 10⁻⁹M, 5×10⁻¹⁰M, 10⁻¹⁰M, 5×10⁻¹¹M, 10⁻¹¹ M, 5×10⁻¹²M, 10⁻¹²M, 5×10⁻¹³M, 10⁻¹³M, 5×10⁻¹⁴M, 10⁻¹⁴M, 5×10⁻¹⁵M, and 10⁻⁵M.

[0556] Moreover, colorectal cancer antigen polypeptides of the present invention or fragments thereof, are useful in inhibiting the angiogenesis of proliferative cells or tissues, either alone, as a protein fusion, or in combination with other polypeptides directly or indirectly, as described elsewhere herein. In a most preferred embodiment, said anti-angiogenesis effect may be achieved indirectly, for example, through the inhibition of hematopoietic, tumor-specific cells, such as tumor-associated macrophages (see, e.g., Joseph 1B, et al. J Natl Cancer Inst, 90(21):1648-53 (1998), which is hereby incorporated by reference). Antibodies directed to polypeptides or polynucleotides of the present invention may also result in inhibition of angiogenesis directly, or indirectly (see, e.g., Witte L, et al., Cancer Metastasis Rev. 17(2):155-61 (1998), which is hereby incorporated by reference)).

[0557] Polypeptides, including protein fusions, of the present invention, or fragments thereof may be useful in inhibiting proliferative cells or tissues through the induction of apoptosis. Said polypeptides may act either directly, or indirectly to induce apoptosis of proliferative cells and tissues, for example in the activation of a death-domain receptor, such as tumor necrosis factor (TNF) receptor-1, CD95 (Fas/APO-1), TNF-receptor-related apoptosis-mediated protein (TRAMP) and TNF-related apoptosis-inducing ligand (TRAIL) receptor-1 and -2 (see, e.g., Schulze-Osthoff K, et.al., Eur J Biochem 254(3):439-59 (1998), which is hereby incorporated by reference). Moreover, in another preferred embodiment of the present invention, said polypeptides may induce apoptosis through other mechanisms, such as in the activation of other proteins which will activate apoptosis, or through stimulating the expression of said proteins, either alone or in combination with small molecule drugs or adjuvants, such as apoptonin, galectins, thioredoxins, antiinflammatory proteins (See for example, Mutat. Res. 400(1-2):447-55 (1998), Med Hypotheses.50(5):423-33 (1998), Chem. Biol. Interact. Apr 24;111-112:23-34 (1998), J. Mo. Med. 76(6):402-12 (1998), Int. J. Tissue React. 20(1):3-15 (1998), which are all hereby incorporated by reference).

[0558] Polypeptides, including protein fusions to, or fragments thereof, of the present invention are useful in inhibiting the metastasis of proliferative cells or tissues. Inhibition may occur as a direct result of administering polypeptides, or antibodies directed to said polypeptides as described elsewhere herein, or indirectly, such as activating the expression of proteins known to inhibit metastasis, for example alpha 4 integrins, (See, e.g., Curr Top Microbiol Immunol 1998;231:125-41, which is hereby incorporated by reference). Such therapeutic affects of the present invention may be achieved either alone, or in combination with small molecule drugs or adjuvants.

[0559] In another embodiment, the invention provides a method of delivering compositions containing the polypeptides of the invention (e.g., compositions containing polypeptides or anti- colorectal cancer antigen polypeptide antibodies associated with heterologous polypeptides, heterologous nucleic acids, toxins, or prodrugs) to targeted cells expressing the polypeptide of the present invention. Colorectal cancer antigen polypeptides or anti- colorectal cancer antigen polypeptide antibodies of the invention may be associated with heterologous polypeptides, heterologous nucleic acids, toxins, or prodrugs via hydrophobic, hydrophilic, ionic and/or covalent interactions.

[0560] Polypeptides, protein fusions to, or fragments thereof, of the present invention are useful in enhancing the immunogenicity and/or antigenicity of proliferating cells or tissues, either directly, such as would occur if the polypeptides of the present invention ‘vaccinated’ the immune response to respond to proliferative antigens and immunogens, or indirectly, such as in activating the expression of proteins known to enhance the immune response (e.g. chemokines), to said antigens and immunogens.

[0561] Urinary System Disorders

[0562] Polynucleotides, polypeptides, antibodies, and/or agonists or antagonists of the present invention, may be used to treat, prevent, diagnose, and/or prognose disorders of the urinary system, including but not limited to disorders of the renal system, bladder, ureters, and urethra. Renal disorders include, but are not limited to, kidney failure, nephritis, blood vessel disorders of kidney, metabolic and congenital kidney disorders, urinary disorders of the kidney, autoimmune disorders, sclerosis and necrosis, electrolyte imbalance, and kidney cancers.

[0563] Kidney failure diseases include, but are not limited to, acute kidney failure, chronic kidney failure, atheroembolic renal failure, and end-stage renal disease. Inflammatory diseases of the kidney include acute glomerulonephritis, postinfectious glomerulonephritis, rapidly progressive glomerulonephritis, nephrotic syndrome, membranous glomerulonephritis, familial nephrotic syndrome, membranoproliferative glomerulonephritis I and II, mesangial proliferative glomerulonephritis, chronic glomerulonephritis, acute tubulointerstitial nephritis, chronic tubulointerstitial nephritis, acute post-streptococcal glomerulonephritis (PSGN), pyelonephritis, lupus nephritis, chronic nephritis, interstitial nephritis, and post-streptococcal glomerulonephfitis.

[0564] Blood vessel disorders of the kidneys include, but are not limited to, kidney infarction, atheroembolic kidney disease, cortical necrosis, malignant nephrosclerosis, renal vein thrombosis, renal underperfusion, renal ischemia-reperfusion, renal artery embolism, and renal artery stenosis. Kidney disorders resulting form urinary tract problems include, but are not limited to, pyelonephritis, hydronephrosis, urolithiasis (renal lithiasis, nephrolithiasis), reflux nephropathy, urinary tract infections, urinary retention, and acute or chronic unilateral obstructive uropathy.

[0565] Metabolic and congenital disorders of the kidneys include, but are not limited to, renal tubular acidosis, renal glycosuria, nephrogenic diabetes insipidus, cystinuria, Fanconi's syndrome, vitamin D-resistant rickets, Hartnup disease, Bartter's syndrome, Liddle's syndrome, polycystic kidney disease, medullary cystic disease, medullary sponge kidney, Alport's syndrome, nail-patella syndrome, congenital nephrotic syndrome, CRUSH syndrome, horseshoe kidney, diabetic nephropathy, nephrogenic diabetes insipidus, analgesic nephropathy, kidney stones, and membranous nephropathy, Kidney disorders resulting from an autoimmune response include, but are not limited to, systemic lupus erythematosus (SLE), Goodpasture syndrome, IgA nephropathy, and IgM mesangial proliferative glomerulonephritis.

[0566] Sclerotic or necrotic disorders of the kidney include, but are not limited to, glomerulosclerosis, diabetic nephropathy, focal segmental glomerulosclerosis (FSGS), necrotizing glomerulonephritis, and renal papillary necrosis. Kidneys may also develop carcinomas, including, but not limited to, hypemephroma, nephroblastoma, renal cell cancer, transitional cell cancer, squamous cell cancer, and Wilm's tumor.

[0567] Kidney disorders may also result in electrolyte imbalances, including, but not limited to, nephrocalcinosis, pyuria, edema, hydronephritis, proteinuria, hyponatremia, hypernatremia, hypokalemia, hyperkalemia, hypocalcemia, hypercalcemia, hypophosphatemia, and hyperphosphatemia.

[0568] Bladder disorders include, but are not limited to, benign prostatic hyperplasia (BPH), interstitial cystitis (IC), prostatitis, proteinuria, urinary tract infections, urinary incontinence, urinary retention. Disorders of the ureters and urethra include, but are not limited to, acute or chronic unilateral obstructive uropathy. The bladder, ureters, and urethra may also develop carcinomas, including, but not limited to, superficial bladder canccer, invasive bladder cancer, carcinoma of the ureter, and urethra cancers.

[0569] Polypeptides may be administered using any method known in the art, including, but not limited to, direct needle injection at the delivery site, intravenous injection, topical administration, catheter infusion, biolistic injectors, particle accelerators, gelfoam sponge depots, other commercially available depot materials, osmotic pumps, oral or suppositorial solid pharmaceutical formulations, decanting or topical applications during surgery, aerosol delivery. Such methods are known in the art. Polypeptides may be administered as part of a Therapeutic, described in more detail below. Methods of delivering polynucleotides are described in more detail herein.

[0570] Cardiovascular Disorders

[0571] Polynucleotides or polypeptides, or agonists or antagonists of the present invention, may be used to treat, prevent, diagnose, and/or prognose cardiovascular disorders, including, but not limited to, peripheral artery disease, such as limb ischemia.

[0572] Cardiovascular disorders include cardiovascular abnormalities, such as arterio-arterial fistula, arteriovenous fistula, cerebral arteriovenous malformations, congenital heart defects, pulmonary atresia, and Scimitar Syndrome. Congenital heart defects include aortic coarctation, cor triatriatum, coronary vessel anomalies, crisscross heart, dextrocardia, patent ductus arteriosus, Ebstein's anomaly, Eisenmenger complex, hypoplastic left heart syndrome, levocardia, tetralogy of fallot, transposition of great vessels, double outlet right ventricle, tricuspid atresia, persistent truncus arteriosus, total anomalous pulmonary venous connection, hypoplastic left heart syndrome, and heart septal defects, such as aortopulmonary septal defect, endocardial cushion defects, Lutembacher's Syndrome, atrioventricular canal defect, trilogy of Fallot, ventricular heart septal defects.

[0573] Cardiovascular disorders also include heart disease, such as arrhythmias, carcinoid heart disease, high cardiac output, low cardiac output, cardiac tamponade, endocarditis (including bacterial), heart aneurysm, cardiac arrest, sudden cardiac death, congestive heart failure, congestive cardiomyopathy, paroxysmal dyspnea, cardiac edema, heart hypertrophy, congestive cardiomyopathy, left ventricular hypertrophy, right ventricular hypertrophy, post-infarction heart rupture, ventricular septal rupture, heart valve diseases, myocardial diseases, myocardial ischemia, pericardial effusion, pericarditis (including constrictive and tuberculous), pneumopericardium, postpericardiotomy syndrome, pulmonary heart disease, rheumatic heart disease, ventricular dysfunction, hyperemia, cardiovascular pregnancy complications, Scimitar Syndrome, diastolic dysfunction, enlarged heart, heart block, J-curve phenomenon, rheumatic heart disease, Marfan syndrome, cardiovascular syphilis, and cardiovascular tuberculosis.

[0574] Arrhythmias include sinus arrhythmia, atrial fibrillation, atrial flutter, bradycardia, extrasystole, Adams-Stokes Syndrome, bundle-branch block, sinoatrial block, long QT syndrome, parasystole, Lown-Ganong-Levine Syndrome, Mahaim-type pre-excitation syndrome, Wolff-Parkinson-White syndrome, sick sinus syndrome, tachycardias, and ventricular fibrillation. Tachycardias include paroxysmal tachycardia, supraventricular tachycardia, accelerated idioventricular rhythm, atrioventricular nodal reentry tachycardia, ectopic atrial tachycardia, ectopic junctional tachycardia, sinoatrial nodal reentry tachycardia, sinus tachycardia, Torsades de Pointes, and ventricular tachycardia.

[0575] Heart valve disease include aortic valve insufficiency, aortic valve stenosis, heart murmurs, aortic valve prolapse, mitral valve prolapse, tricuspid valve prolapse, mitral valve insufficiency, mitral valve stenosis, pulmonary atresia, pulmonary valve insufficiency, pulmonary valve stenosis, tricuspid atresia, tricuspid valve insufficiency, tricuspid valve stenosis, and bicuspid aortic valve.

[0576] Myocardial diseases include alcoholic cardiomyopathy, congestive cardiomyopathy, hypertrophic cardiomyopathy, aortic subvalvular stenosis, pulmonary subvalvular stenosis, restrictive cardiomyopathy, Chagas cardiomyopathy, endocardial fibroelastosis, endomyocardial fibrosis, Kearns Syndrome, Barth syndrome, myocardial reperfusion injury, and myocarditis.

[0577] Myocardial ischemias include coronary disease, such as angina pectoris, Prinzmetal's angina, unstable angina, coronary aneurysm, coronary arteriosclerosis, coronary thrombosis, coronary vasospasm, myocardial infarction and myocardial stunning.

[0578] Cardiovascular diseases also include vascular diseases such as aneurysms, angiodysplasia, angiomatosis, bacillary angiomatosis, Hippel-Lindau Disease, Klippel-Trenaunay-Weber Syndrome, Sturge-Weber Syndrome, angioneurotic edema, aortic diseases, Takayasu's Arteritis, aortitis, Leriche's Syndrome, arterial occlusive diseases, arteritis, enarteritis, polyarteritis nodosa, cerebrovascular disorders, diabetic angiopathies, diabetic retinopathy, embolisms, thrombosis, erythromelalgia, hemorrhoids, hepatic veno-occlusive disease, hypertension, hypotension (shock), ischemia, peripheral vascular diseases, phlebitis, superficial phlebitis, pulmonary veno-occlusive disease, chronic obstructive pulmonary disease, Buerger's disease, Raynaud's disease, CREST syndrome, retinal vein occlusion, Scimitar syndrome, superior vena cava syndrome, telangiectasia, atacia telangiectasia, hereditary hemorrhagic telangiectasia, deep vein thrombosis, varicocele, varicose veins, varicose ulcer, vasculitis, and venous insufficiency.

[0579] Aneurysms include dissecting aneurysms, false aneurysms, infected aneurysms, ruptured aneurysms, aortic aneurysms, cerebral aneurysms, coronary aneurysms, heart aneurysms, and iliac aneurysms.

[0580] Arterial occlusive diseases include arteriosclerosis, arteriolosclerosis, atherosclerosis, intermittent claudication, carotid stenosis, fibromuscular dysplasias, mesenteric vascular occlusion, Moyamoya disease, renal artery obstruction, retinal artery occlusion, and thromboangiitis obliterans.

[0581] Cerebrovascular disorders include carotid artery diseases, cerebral amyloid angiopathy, cerebral aneurysm, cerebral anoxia, cerebral arteriosclerosis, cerebral arteriovenous malformation, cerebral artery diseases, cerebral embolism and thrombosis, carotid artery thrombosis, sinus thrombosis, Wallenberg's syndrome, cerebral hemorrhage, epidural hematoma, subdural hematoma, subaraxhnoid hemorrhage, cerebral infarction, cerebral ischemia (including transient), subclavian steal syndrome, periventricular leukomalacia, vascular headache, cluster headache, migraine, and vertebrobasilar insufficiency.

[0582] Embolisms include air embolisms, amniotic fluid embolisms, cholesterol embolisms, blue toe syndrome, fat embolisms, pulmonary embolisms, and thromoboembolisms. Thrombosis include coronary thrombosis, hepatic vein thrombosis, deep vein thrombosis, retinal vein occlusion, carotid artery thrombosis, sinus thrombosis, Wallenberg's syndrome, and thrombophlebitis.

[0583] Ischemia includes cerebral ischemia, ischemic colitis, silent ischemia, compartment syndromes, anterior compartment syndrome, myocardial ischemia, reperfusion injuries, and peripheral limb ischemia. Vasculitis includes aortitis, arteritis, Behcet's Syndrome, Churg-Strauss Syndrome, mucocutaneous lymph node syndrome, thromboangiitis obliterans, hypersensitivity vasculitis, Schoenlein-Henoch purpura, allergic cutaneous vasculitis, and Wegener's granulomatosis.

[0584] Cardiovascular diseases can also occur due to electrolyte imbalances that include, but are not limited to hyponatremia, hypernatremia, hypokalemia, hyperkalemia, hypocalcernia, hypercalcemia, hypophosphatemia, and hyperphophatemia. Neoplasm and/or cancers of the cardiovascular system include, but are not limited to, myxomas, fibromas, and rhabdomyomas.

[0585] Polypeptides may be administered using any method known in the art, including, but not limited to, direct needle injection at the delivery site, intravenous injection, topical administration, catheter infusion, biolistic injectors, particle accelerators, gelfoam sponge depots, other commercially available depot materials, osmotic pumps, oral or suppositorial solid pharmaceutical formulations, decanting or topical applications during surgery, aerosol delivery. Such methods are known in the art. Polypeptides may be administered as part of a Therapeutic, described in more detail below. Methods of delivering polynucleotides are described in more detail herein.

[0586] Respiratory Disorders

[0587] Polynucleotides or polypeptides, or agonists or antagonists of the present invention may be used to treat, prevent, diagnose, and/or prognose diseases and/or disorders of the respiratory system.

[0588] Diseases and disorders of the respiratory system include, but are not limited to, nasal vestibulitis, nonallergic rhinitis (e.g., acute rhinitis, chronic rhinitis, atrophic rhinitis, vasomotor rhinitis), nasal polyps, and sinusitis, juvenile angiofibromas, cancer of the nose and juvenile papillomas, vocal cord polyps, nodules (singer's nodules), contact ulcers, vocal cord paralysis, laryngoceles, pharyngitis (e.g., viral and bacterial), tonsillitis, tonsillar cellulitis, parapharyngeal abscess, laryngitis, laryngoceles, and throat cancers (e.g., cancer of the nasopharynx, tonsil cancer, larynx cancer), lung cancer (e.g., squamous cell carcinoma, small cell (oat cell) carcinoma, large cell carcinoma, and adenocarcinoma), allergic disorders (eosinophilic pneumonia, hypersensitivity pneumonitis (e.g., extrinsic allergic alveolitis, allergic interstitial pneumonitis, organic dust pneumoconiosis, allergic bronchopulmonary aspergillosis, asthma, Wegener's granulomatosis (granulomatous vasculitis), Goodpasture's syndrome)), pneumonia (e.g., bacterial pneumonia (e.g., Streptococcus pneumoniae (pneumoncoccal pneumonia), Staphylococcus aureus (staphylococcal pneumonia), Gram-negative bacterial pneumonia (caused by, e.g., Klebsiella and Pseudomas spp.), Mycoplasma pneumoniae pneumonia, Hemophilus influenzae pneumonia, Legionella pneumophila (Legionnaires' disease), and Chlamydia psittaci (Psittacosis)), and viral pneumonia (e.g., influenza, chickenpox (varicella).

[0589] Additional diseases and disorders of the respiratory system include, but are not limited to bronchiolitis, polio (poliomyelitis), croup, respiratory syncytial viral infection, mumps, erythema infectiosum (fifth disease), roseola infantum, progressive rubella panencephalitis, german measles, and subacute sclerosing panencephalitis), fungal pneumonia (e.g., Histoplasmosis, Coccidioidomycosis, Blastomycosis, fungal infections in people with severely suppressed immune systems (e.g., cryptococcosis, caused by Cryptococcus neoformans; aspergillosis, caused by Aspergillus spp.; candidiasis, caused by Candida; and mucormycosis)), Pneumocystis carinii (pneumocystis pneumonia), atypical pneumonias (e.g., Mycoplasma and Chlamydia spp.), opportunistic infection pneumonia, nosocomial pneumonia, chemical pneumonitis, and aspiration pneumonia, pleural disorders (e.g., pleurisy, pleural effusion, and pneumothorax (e.g., simple spontaneous pneumothorax, complicated spontaneous pneumothorax, tension pneumothorax)), obstructive airway diseases (e.g., asthma, chronic obstructive pulmonary disease (COPD), emphysema, chronic or acute bronchitis), occupational lung diseases (e.g., silicosis, black lung (coal workers' pneumoconiosis), asbestosis, berylliosis, occupational asthsma, byssinosis, and benign pneumoconioses), Infiltrative Lung Disease (e.g., pulmonary fibrosis (e.g., fibrosing alveolitis, usual interstitial pneumonia), idiopathic pulmonary fibrosis, desquamative interstitial pneumonia, lymphoid interstitial pneumonia, histiocytosis X (e.g., Letterer-Siwe disease, Hand-Schüller-Christian disease, eosinophilic granuloma), idiopathic pulmonary hemosiderosis, sarcoidosis and pulmonary alveolar proteinosis), Acute respiratory distress syndrome (also called, e.g., adult respiratory distress syndrome), edema, pulmonary embolism, bronchitis (e.g., viral, bacterial), bronchiectasis, atelectasis, lung abscess (caused by, e.g., Staphylococcus aureus or Legionella pneumophila), and cystic fibrosis.

[0590] Anti-Angiogenesis Activity

[0591] The naturally occurring balance between endogenous stimulators and inhibitors of angiogenesis is one in which inhibitory influences predominate. Rastinejad et al., Cell 56:345-355 (1989). In those rare instances in which neovascularization occurs under normal physiological conditions, such as wound healing, organ regeneration, embryonic development, and female reproductive processes, angiogenesis is stringently regulated and spatially and temporally delimited. Under conditions of pathological angiogenesis such as that characterizing solid tumor growth, these regulatory controls fail. Unregulated angiogenesis becomes pathologic and sustains progression of many neoplastic and non-neoplastic diseases. A number of serious diseases are dominated by abnormal neovascularization including solid tumor growth and metastases, arthritis, some types of eye disorders, and psoriasis. See, e.g., reviews by Moses et al., Biotech. 9:630-634 (1991); Folkman et al., N. Engl. J. Med., 333:1757-1763 (1995); Auerbach et al., J. Microvasc. Res. 29:401-411 (1985); Folkman, Advances in Cancer Research, eds. Klein and Weinhouse, Academic Press, New York, pp. 175-203 (1985); Patz, Am. J. Opthalmol. 94:715-743 (1982); and Folkman et al., Science 221:719-725 (1983). In a number of pathological conditions, the process of angiogenesis contributes to the disease state. For example, significant data have accumulated which suggest that the growth of solid tumors is dependent on angiogenesis. Folkman and Klagsbrun, Science 235:442-447 (1987). [0565] The present invention provides for treatment of diseases or disorders associated with neovascularization by administration of the polynucleotides and/or polypeptides of the invention, as well as agonists or antagonists of the present invention. Malignant and metastatic conditions which can be treated with the polynucleotides and polypeptides, or agonists or antagonists of the invention include, but are not limited to, malignancies, solid tumors, and cancers described herein and otherwise known in the art (for a review of such disorders, see Fishman et al., Medicine, 2d Ed., J. B. Lippincott Co., Philadelphia (1985)). Thus, the present invention provides a method of treating an angiogenesis-related disease and/or disorder, comprising administration to an individual in need thereof a therapeutically effective amount of a polynucleotide, polypeptide, antagonist and/or agonist of the invention. For example, polynucleotides, polypeptides, antagonists and/or agonists may be utilized in a variety of additional methods in order to therapeutically treat a cancer or tumor. Cancers which may be treated with polynucleotides, polypeptides, antagonists and/or agonists include, but are not limited to solid tumors, including prostate, lung, breast, ovarian, stomach, pancreas, larynx, esophagus, testes, liver, parotid, biliary tract, colon, rectum, cervix, uterus, endometrium, kidney, bladder, thyroid cancer; primary tumors and metastases; melanomas; glioblastoma; Kaposi's sarcoma; leiomyosarcoma; non- small cell lung cancer; colorectal cancer; advanced malignancies; and blood born tumors such as leukemias. For example, polynucleotides, polypeptides, antagonists and/or agonists may be delivered topically, in order to treat cancers such as skin cancer, head and neck tumors, breast tumors, and Kaposi's sarcoma.

[0592] Within yet other aspects, polynucleotides, polypeptides, antagonists and/or agonists may be utilized to treat superficial forms of bladder cancer by, for example, intravesical administration. Polynucleotides, polypeptides, antagonists and/or agonists may be delivered directly into the tumor, or near the tumor site, via injection or a catheter. Of course, as the artisan of ordinary skill will appreciate, the appropriate mode of administration will vary according to the cancer to be treated. Other modes of delivery are discussed herein.

[0593] Polynucleotides, polypeptides, antagonists and/or agonists may be useful in treating other disorders, besides cancers, which involve angiogenesis. These disorders include, but are not limited to: benign tumors, for example hemangiomas, acoustic neuromas, neurofibromas, trachomas, and pyogenic granulomas; artheroscleric plaques; ocular angiogenic diseases, for example, diabetic retinopathy, retinopathy of prematurity, macular degeneration, corneal graft rejection, neovascular glaucoma, retrolental fibroplasia, rubeosis, retinoblastoma, uvietis and Pterygia (abnormal blood vessel growth) of the eye; rheumatoid arthritis; psoriasis; delayed wound healing; endometriosis; vasculogenesis; granulations; hypertrophic scars (keloids); nonunion fractures; scleroderma; trachoma; vascular adhesions; myocardial angiogenesis; coronary collaterals; cerebral collaterals; arteriovenous malformations; ischemic limb angiogenesis; Osler-Webber Syndrome; plaque neovascularization; telangiectasia; hemophiliac joints; angiofibroma; fibromuscular dysplasia; wound granulation; Crohn's disease; and atherosclerosis.

[0594] For example, within one aspect of the present invention methods are provided for treating hypertrophic scars and keloids, comprising the step of administering a polynucleotide, polypeptide, antagonist and/or agonist of the invention to a hypertrophic scar or keloid.

[0595] Within one embodiment of the present invention polynucleotides, polypeptides, antagonists and/or agonists of the invention are directly injected into a hypertrophic scar or keloid, in order to prevent the progression of these lesions. This therapy is of particular value in the prophylactic treatment of conditions which are known to result in the development of hypertrophic scars and keloids (e.g., bums), and is preferably initiated after the proliferative phase has had time to progress (approximately 14 days after the initial injury), but before hypertrophic scar or keloid development. As noted above, the present invention also provides methods for treating neovascular diseases of the eye, including for example, corneal neovascularization, neovascular glaucoma, proliferative diabetic retinopathy, retrolental fibroplasia and macular degeneration.

[0596] Moreover, ocular disorders associated with neovascularization which can be treated with the polynucleotides and polypeptides of the present invention (including agonists and/or antagonists) include, but are not limited to: neovascular glaucoma, diabetic retinopathy, retinoblastoma, retrolental fibroplasia, uveitis, retinopathy of prematurity macular degeneration, corneal graft neovascularization, as well as other eye inflammatory diseases, ocular tumors and diseases associated with choroidal or iris neovascularization. See, e.g., reviews by Waltman et al., Am. J. Ophthal. 85:704-710 (1978) and Gartner et al., Surv. Ophthal. 22:291-312 (1978).

[0597] Thus, within one aspect of the present invention methods are provided for treating neovascular diseases of the eye such as corneal neovascularization (including corneal graft neovascularization), comprising the step of administering to a patient a therapeutically effective amount of a compound (as described above) to the cornea, such that the formation of blood vessels is inhibited. Briefly, the cornea is a tissue, which normally lacks blood vessels. In certain pathological conditions however, capillaries may extend into the cornea from the pericorneal vascular plexus of the limbus. When the cornea becomes vascularized, it also becomes clouded, resulting in a decline in the patient's visual acuity. Visual loss may become complete if the cornea completely opacitates. A wide variety of disorders can result in corneal neovascularization, including for example, corneal infections (e.g., trachoma, herpes simplex keratitis, leishmaniasis and onchocerciasis), immunological processes (e.g., graft rejection and Stevens-Johnson's syndrome), alkali burns, trauma, inflammation (of any cause), toxic and nutritional deficiency states, and as a complication of wearing contact lenses.

[0598] Within particularly preferred embodiments of the invention, may be prepared for topical administration in saline (combined with any of the preservatives and antimicrobial agents commonly used in ocular preparations), and administered in eyedrop form. The solution or suspension may be prepared in its pure form and administered several times daily. Alternatively, anti-angiogenic compositions, prepared as described above, may also be administered directly to the cornea. Within preferred embodiments, the anti-angiogenic composition is prepared with a muco-adhesive polymer, which binds to cornea. Within further embodiments, the anti-angiogenic factors or anti-angiogenic compositions may be utilized as an adjunct to conventional steroid therapy. Topical therapy may also be useful prophylactically in corneal lesions which are known to have a high probability of inducing an angiogenic response (such as chemical burns). In these instances the treatment, likely in combination with steroids, may be instituted immediately to help prevent subsequent complications.

[0599] Within other embodiments, the compounds described above may be injected directly into the corneal stroma by an ophthalmologist under microscopic guidance. The preferred site of injection may vary with the morphology of the individual lesion, but the goal of the administration would be to place the composition at the advancing front of the vasculature (i.e., interspersed between the blood vessels and the normal cornea). In most cases this would involve perilimbic corneal injection to “protect” the cornea from the advancing blood vessels. This method may also be utilized shortly after a corneal insult in order to prophylactically prevent corneal neovascularization. In this situation, the material could be injected in the perilimbic cornea interspersed between the corneal lesion and its undesired potential limbic blood supply. Such methods may also be utilized in a similar fashion to prevent capillary invasion of transplanted corneas. In a sustained-release form, injections might only be required 2-3 times per year. A steroid could also be added to the injection solution to reduce inflammation resulting from the injection itself.

[0600] Within another aspect of the present invention, methods are provided for treating neovascular glaucoma, comprising the step of administering to a patient a therapeutically effective amount of a polynucleotide, polypeptide, antagonist and/or agonist to the eye, such that the formation of blood vessels is inhibited. In one embodiment, the compound may be administered topically to the eye in order to treat early forms of neovascular glaucoma. Within other embodiments, the compound may be implanted by injection into the region of the anterior chamber angle. Within other embodiments, the compound may also be placed in any location such that the compound is continuously released into the aqueous humor. Within another aspect of the present invention, methods are provided for treating proliferative diabetic retinopathy, comprising the step of administering to a patient a therapeutically effective amount of a polynucleotide, polypeptide, antagonist and/or agonist to the eyes, such that the formation of blood vessels is inhibited.

[0601] Within particularly preferred embodiments of the invention, proliferative diabetic retinopathy may be treated by injection into the aqueous humor or the vitreous, in order to increase the local concentration of the polynucleotide, polypeptide, antagonist and/or agonist in the retina. Preferably, this treatment should be initiated prior to the acquisition of severe disease requiring photocoagulation.

[0602] Within another aspect of the present invention, methods are provided for treating retrolental fibroplasia, comprising the step of administering to a patient a therapeutically effective amount of a polynucleotide, polypeptide, antagonist and/or agonist to the eye, such that the formation of blood vessels is inhibited. The compound may be administered topically, via intravitreous injection and/or via intraocular implants.

[0603] Additionally, disorders which can be treated with the polynucleotides, polypeptides, agonists and/or agonists include, but are not limited to, hemangioma, arthritis, psoriasis, angiofibroma, atherosclerotic plaques, delayed wound healing, granulations, hemophilic joints, hypertrophic scars, nonunion fractures, Osler-Weber syndrome, pyogenic granuloma, scleroderma, trachoma, and vascular adhesions.

[0604] Moreover, disorders and/or states, which can be treated, prevented, diagnosed and/or prognosed with the polynucleotides, polypeptides, agonists and/or agonists of the invention include, but are not limited to, solid tumors, blood born tumors such as leukemias, tumor metastasis, Kaposi's sarcoma, benign tumors, for example hemangiomas, acoustic neuromas, neurofibromas, trachomas, and pyogenic granulomas, rheumatoid arthritis, psoriasis, ocular angiogenic diseases, for example, diabetic retinopathy, retinopathy of prematurity, macular degeneration, corneal graft rejection, neovascular glaucoma, retrolental fibroplasia, rubeosis, retinoblastoma, and uvietis, delayed wound healing, endometriosis, vascluogenesis, granulations, hypertrophic scars (keloids), nonunion fractures, scleroderma, trachoma, vascular adhesions, myocardial angiogenesis, coronary collaterals, cerebral collaterals, arteriovenous malformations, ischemic limb angiogenesis, Osler-Webber Syndrome, plaque neovascularization, telangiectasia, hemophiliac joints, angiofibroma fibromuscular dysplasia, wound granulation, Crohn's disease, atherosclerosis, birth control agent by preventing vascularization required for embryo implantation controlling menstruation, diseases that have angiogenesis as a pathologic consequence such as cat scratch disease (Rochele minalia quintosa), ulcers (Helicobacter pylori), Bartonellosis and bacillary angiomatosis.

[0605] In one aspect of the birth control method, an amount of the compound sufficient to block embryo implantation is administered before or after intercourse and fertilization have occurred, thus providing an effective method of birth control, possibly a “morning after” method. Polynucleotides, polypeptides, agonists and/or agonists may also be used in controlling menstruation or administered as either a peritoneal lavage fluid or for peritoneal implantation in the treatment of endometriosis.

[0606] Polynucleotides, polypeptides, agonists and/or agonists of the present invention may be incorporated into surgical sutures in order to prevent stitch granulomas.

[0607] Polynucleotides, polypeptides, agonists and/or agonists may be utilized in a wide variety of surgical procedures. For example, within one aspect of the present invention a compositions (in the form of, for example, a spray or film) may be utilized to coat or spray an area prior to removal of a tumor, in order to isolate normal surrounding tissues from malignant tissue, and/or to prevent the spread of disease to surrounding tissues. Within other aspects of the present invention, compositions (e.g., in the form of a spray) may be delivered via endoscopic procedures in order to coat tumors, or inhibit angiogenesis in a desired locale. Within yet other aspects of the present invention, surgical meshes, which have been coated with anti- angiogenic compositions of the present invention may be utilized in any procedure wherein a surgical mesh might be utilized. For example, within one embodiment of the invention a surgical mesh laden with an anti-angiogenic composition may be utilized during abdominal cancer resection surgery (e.g., subsequent to colon resection) in order to provide support to the structure, and to release an amount of the anti-angiogenic factor.

[0608] Within further aspects of the present invention, methods are provided for treating tumor excision sites, comprising administering a polynucleotide, polypeptide, agonist and/or agonist to the resection margins of a tumor subsequent to excision, such that the local recurrence of cancer and the formation of new blood vessels at the site is inhibited. Within one embodiment of the invention, the anti-angiogenic compound is administered directly to the tumor excision site (e.g., applied by swabbing, brushing or otherwise coating the resection margins of the tumor with the anti-angiogenic compound). Alternatively, the anti-angiogenic compounds may be incorporated into known surgical pastes prior to administration. Within particularly preferred embodiments of the invention, the anti-angiogenic compounds are applied after hepatic resections for malignancy, and after neurosurgical operations.

[0609] Within one aspect of the present invention, polynucleotides, polypeptides, agonists and/or agonists may be administered to the resection margin of a wide variety of tumors, including for example, breast, colon, brain and hepatic tumors. For example, within one embodiment of the invention, anti-angiogenic compounds may be administered to the site of a neurological tumor subsequent to excision, such that the formation of new blood vessels at the site are inhibited.

[0610] The polynucleotides, polypeptides, agonists and/or agonists of the present invention may also be administered along with other anti-angiogenic factors. Representative examples of other anti-angiogenic factors include: Anti-Invasive Factor, retinoic acid and derivatives thereof, paclitaxel, Suramin, Tissue Inhibitor of Metalloproteinase-l, Tissue Inhibitor of Metalloproteinase-2, Plasminogen Activator Inhibitor-1, Plasminogen Activator Inhibitor-2, and various forms of the lighter “d group” transition metals.

[0611] Lighter “d group” transition metals include, for example, vanadium, molybdenum, tungsten, titanium, niobium, and tantalum species. Such transition metal species may form transition metal complexes. Suitable complexes of the above-mentioned transition metal species include oxo transition metal complexes.

[0612] Representative examples of vanadium complexes include oxo vanadium complexes such as vanadate and vanadyl complexes. Suitable vanadate complexes include metavanadate and orthovanadate complexes such as, for example, ammonium metavanadate, sodium metavanadate, and sodium orthovanadate. Suitable vanadyl complexes include, for example, vanadyl acetylacetonate and vanadyl sulfate including vanadyl sulfate hydrates such as vanadyl sulfate mono- and trihydrates.

[0613] Representative examples of tungsten and molybdenum complexes also include oxo complexes. Suitable oxo tungsten complexes include tungstate and tungsten oxide complexes. Suitable tungstate complexes include ammonium tungstate, calcium tungstate, sodium tungstate dihydrate, and tungstic acid. Suitable tungsten oxides include tungsten (IV) oxide and tungsten (VI) oxide. Suitable oxo molybdenum complexes include molybdate, molybdenum oxide, and molybdenyl complexes. Suitable molybdate complexes include ammonium molybdate and its hydrates, sodium molybdate and its hydrates, and potassium molybdate and its hydrates. Suitable molybdenum oxides include molybdenum (VI) oxide, molybdenum (VI) oxide, and molybdic acid. Suitable molybdenyl complexes include, for example, molybdenyl acetylacetonate. Other suitable tungsten and molybdenum complexes include hydroxo derivatives derived from, for example, glycerol, tartaric acid, and sugars.

[0614] A wide variety of other anti-angiogenic factors may also be utilized within the context of the present invention. Representative examples include platelet factor 4; protamine sulphate; sulphated chitin derivatives (prepared from queen crab shells), (Murata et al., Cancer Res. 51:22-26 (1991)); Sulphated Polysaccharide Peptidoglycan Complex (SP-PG) (the function of this compound may be enhanced by the presence of steroids such as estrogen, and tamoxifen citrate); Staurosporine; modulators of matrix metabolism, including for example, proline analogs, cishydroxyproline, d,L-3,4-dehydroproline, Thiaproline, alpha,alpha-dipyridyl, aminopropionitrile fumarate; 4-propyl-5-(4-pyridinyl)-2(3H)-oxazolone; Methotrexate; Mitoxantrone; Heparin; Interferons; 2 Macroglobulin-serum; ChIMP-3 (Pavloff et al., J. Bio. Chem. 267:17321-17326 (1992)); Chymostatin (Tomkinson et al., Biochem J. 286:475-480 (1992)); Cyclodextrin Tetradecasulfate; Eponemycin; Camptothecin; Fumagillin (Ingber et al., Nature 348:555-557 (1990)); Gold Sodium Thiomalate (“GST”; Matsubara and Ziff, J. Clin. Invest. 79:1440-1446 (1987)); anticollagenase-serum; alpha2-antiplasmin (Holmes et al., J. Biol. Chem. 262(4):1659-1664 (1987)); Bisantrene (National Cancer Institute); Lobenzarit disodium (N-(2)-carboxyphenyl-4- chloroanthronilic acid disodium or “CCA”; Takeuchi et al., Agents Actions 36:312-316, 1992); Thalidomide; Angostatic steroid; AGM-1470; carboxynaminolmidazole; and metalloproteinase inhibitors such as BB94. Musculoskeletal System Disorders

[0615] Polynucleotides, polypeptides, antibodies, and/or agonists or antagonists of the present invention, may be used to treat, prevent, diagnose, and/or prognose disorders of the musculoskeletal system, including but not limited to, disorders of the bone, joints, ligaments, tendons, bursa, muscle, and/or neoplasms and cancers associated with musculoskeletal tissue.

[0616] Diseases or disorders of the bone include, but are not limited to, Albers-Schonberg disease, bowlegs, heel spurs, Kohler's bone disease, knock-knees, Legg-Calve-Perthes disease, Marfan's syndrome, mucopolysaccharidoses, Osgood-Schlatter disease, osteochondroses, osteochondrodysplasia, osteomyelitis, osteopetroses, osteoporosis (postmenopausal, senile, and juvenile), Paget's disease, Scheuermann's disease, scoliosis, Sever's disease, and patellofemoral stress syndrome.

[0617] Joint diseases or disorders include, but are not limited to, ankylosing spondylitis, Behçet's syndrome, CREST syndrome, Ehlers-Danlos syndrome, infectious arthritis, discoid lupus erythematosus, systemic lupus erythematosus, Lyme disease, osteoarthritis, psoriatic arthritis, relapsing polychondrites, Reiter's syndrome, rheumatoid arthritis (adult and juvenile), scleroderma, and Still's disease.

[0618] Diseases or disorders affecting ligaments, tendons, or bursa include, but are not limited to, ankle sprain, bursitis, posterior Achilles tendon bursitis (Haglund's deformity), anterior Achilles tendon bursitis (Albert's disease), tendinitis, tenosynovitis, poplieus tendinitis, Achilles tendinitis, medial or lateral epicondylitis, rotator cuff tendinitis, spasmodic torticollis, and fibromyalgia syndrome.

[0619] Muscle diseases or disorders include, but are not limited to, Becker's muscular dystrophy, Duchenne's muscular dystrophy, Landouzy-Dejerine muscular dystrophy, Leyden-Möbius muscular dystrophy, Erb's muscular dystrophy, Charcot's joints, dermatomyositis, gout, pseudogout, glycogen storage diseases, Pompe's disease, mitochondrial myopathy, periodic paralysis, polymyalgia rheumatica, polymyositis, Steinert's disease, Thomsen's disease, anterolateral and posteromedial shin splints, posterior femoral muscle strain, and fibromyositis.

[0620] Musculoskeletal tissue may also develop cancers and/or neoplasms that include, but are not limited to, osteochondroma, benign chondroma, chondroblastoma, chondromyxoid fibroma, osteoid osteoma, giant cell tumor, multiple myeloma, osteosarcoma, fibrosarcoma, malignant fibrous histiocytoma, chondrosarcoma, Ewing's tumor, and malignant lymphoma of bone.

[0621] Neural Activity and Neurological Diseases

[0622] The polynucleotides, polypeptides and agonists or antagonists of the invention may be used for the diagnosis and/or treatment of diseases, disorders, damage or injury of the brain and/or nervous system. Nervous system disorders that can be treated with the compositions of the invention (e.g., polypeptides, polynucleotides, and/or agonists or antagonists), include, but are not limited to, nervous system injuries, and diseases or disorders which result in either a disconnection of axons, a diminution or degeneration of neurons, or demyelination. Nervous system lesions which may be treated in a patient (including human and non-human mammalian patients) according to the methods of the invention, include but are not limited to, the following lesions of either the central (including spinal cord, brain) or peripheral nervous systems: (1) ischemic lesions, in which a lack of oxygen in a portion of the nervous system results in neuronal injury or death, including cerebral infarction or ischemia, or spinal cord infarction or ischemia; (2) traumatic lesions, including lesions caused by physical injury or associated with surgery, for example, lesions which sever a portion of the nervous system, or compression injuries; (3) malignant lesions, in which a portion of the nervous system is destroyed or injured by malignant tissue which is either a nervous system associated malignancy or a malignancy derived from non-nervous system tissue; (4) infectious lesions, in which a portion of the nervous system is destroyed or injured as a result of infection, for example, by an abscess or associated with infection by human immunodeficiency virus, herpes zoster, or herpes simplex virus or with Lyme disease, tuberculosis, or syphilis; (5) degenerative lesions, in which a portion of the nervous system is destroyed or injured as a result of a degenerative process including but not limited to, degeneration associated with Parkinson's disease, Alzheimer's disease, Huntington's chorea, or amyotrophic lateral sclerosis (ALS); (6) lesions associated with nutritional diseases or disorders, in which a portion of the nervous system is destroyed or injured by a nutritional disorder or disorder of metabolism including, but not limited to, vitamin B12 deficiency, folic acid deficiency, Wemicke disease, tobacco-alcohol amblyopia, Marchiafava-Bignami disease (primary degeneration of the corpus callosum), and alcoholic cerebellar degeneration; (7) neurological lesions associated with systemic diseases including, but not limited to, diabetes (diabetic neuropathy, Bell's palsy), systemic lupus erythematosus, carcinoma, or sarcoidosis; (8) lesions caused by toxic substances including alcohol, lead, or particular neurotoxins; and (9) demyelinated lesions in which a portion of the nervous system is destroyed or injured by a demyelinating disease including, but not limited to, multiple sclerosis, human immunodeficiency virus-associated myelopathy, transverse myelopathy or various etiologies, progressive multifocal leukoencephalopathy, and central pontine myelinolysis.

[0623] In one embodiment, the polypeptides, polynucleotides, or agonists or antagonists of the invention are used to protect neural cells from the damaging effects of hypoxia. In a further preferred embodiment, the polypeptides, polynucleotides, or agonists or antagonists of the invention are used to protect neural cells from the damaging effects of cerebral hypoxia. According to this embodiment, the compositions of the invention are used to treat or prevent neural cell injury associated with cerebral hypoxia. In one non-exclusive aspect of this embodiment, the polypeptides, polynucleotides, or agonists or antagonists of the invention, are used to treat or prevent neural cell injury associated with cerebral ischemia. In another non-exclusive aspect of this embodiment, the polypeptides, polynucleotides, or agonists or antagonists of the invention are used to treat or prevent neural cell injury associated with cerebral infarction.

[0624] In another preferred embodiment, the polypeptides, polynucleotides, or agonists or antagonists of the invention are used to treat or prevent neural cell injury associated with a stroke. In a specific embodiment, the polypeptides, polynucleotides, or agonists or antagonists of the invention are used to treat or prevent cerebral neural cell injury associated with a stroke.

[0625] In another preferred embodiment, the polypeptides, polynucleotides, or agonists or antagonists of the invention are used to treat or prevent neural cell injury associated with a heart attack. In a specific embodiment, the polypeptides, polynucleotides, or agonists or antagonists of the invention are used to treat or prevent cerebral neural cell injury associated with a heart attack.

[0626] The compositions of the invention which are useful for treating or preventing a nervous system disorder may be selected by testing for biological activity in promoting the survival or differentiation of neurons. For example, and not by way of limitation, compositions of the invention which elicit any of the following effects may be useful according to the invention: (1) increased survival time of neurons in culture either in the presence or absence of hypoxia or hypoxic conditions; (2) increased sprouting of neurons in culture or in vivo; (3) increased production of a neuron-associated molecule in culture or in vivo, e.g., choline acetyltransferase or acetylcholinesterase with respect to motor neurons; or (4) decreased symptoms of neuron dysfunction in vivo. Such effects may be measured by any method known in the art. In preferred, non-limiting embodiments, increased survival of neurons may routinely be measured using a method set forth herein or otherwise known in the art, such as, for example, in Zhang et al., Proc Natl Acad Sci USA 97:3637-42 (2000) or in Arakawa et al., J. Neurosci., 10:3507-15 (1990); increased sprouting of neurons may be detected by methods known in the art, such as, for example, the methods set forth in Pestronk et al., Exp. Neurol., 70:65-82 (1980), or Brown et al., Ann. Rev. Neurosci., 4:17-42 (1981); increased production of neuron-associated molecules may be measured by bioassay, enzymatic assay, antibody binding, Northern blot assay, etc., using techniques known in the art and depending on the molecule to be measured; and motor neuron dysfunction may be measured by assessing the physical manifestation of motor neuron disorder, e.g., weakness, motor neuron conduction velocity, or functional disability.

[0627] In specific embodiments, motor neuron disorders that may be treated according to the invention include, but are not limited to, disorders such as infarction, infection, exposure to toxin, trauma, surgical damage, degenerative disease or malignancy that may affect motor neurons as well as other components of the nervous system, as well as disorders that selectively affect neurons such as amyotrophic lateral sclerosis, and including, but not limited to, progressive spinal muscular atrophy, progressive bulbar palsy, primary lateral sclerosis, infantile and juvenile muscular atrophy, progressive bulbar paralysis of childhood (Fazio-Londe syndrome), poliomyelitis and the post polio syndrome, and Hereditary Motorsensory Neuropathy (Charcot-Marie-Tooth Disease).

[0628] Further, polypeptides or polynucleotides of the invention may play a role in neuronal survival; synapse formation; conductance; neural differentiation, etc. Thus, compositions of the invention (including polynucleotides, polypeptides, and agonists or antagonists) may be used to diagnose and/or treat or prevent diseases or disorders associated with these roles, including, but not limited to, learning and/or cognition disorders. The compositions of the invention may also be useful in the treatment or prevention of neurodegenerative disease states and/or behavioural disorders. Such neurodegenerative disease states and/or behavioral disorders include, but are not limited to, Alzheimer's Disease, Parkinson's Disease, Huntington's Disease, Tourette Syndrome, schizophrenia, mania, dementia, paranoia, obsessive compulsive disorder, panic disorder, learning disabilities, ALS, psychoses, autism, and altered behaviors, including disorders in feeding, sleep patterns, balance, and perception. In addition, compositions of the invention may also play a role in the treatment, prevention and/or detection of developmental disorders associated with the developing embryo, or sexually-linked disorders.

[0629] Additionally, polypeptides, polynucleotides and/or agonists or antagonists of the invention, may be useful in protecting neural cells from diseases, damage, disorders, or injury, associated with cerebrovascular disorders including, but not limited to, carotid artery diseases (e.g., carotid artery thrombosis, carotid stenosis, or Moyamoya Disease), cerebral amyloid angiopathy, cerebral aneurysm, cerebral anoxia, cerebral arteriosclerosis, cerebral arteriovenous malformations, cerebral artery diseases, cerebral embolism and thrombosis (e.g., carotid artery thrombosis, sinus thrombosis, or Wallenberg's Syndrome), cerebral hemorrhage (e.g., epidural or subdural hematoma, or subarachnoid hemorrhage), cerebral infarction, cerebral ischemia (e.g., transient cerebral ischemia, Subclavian Steal Syndrome, or vertebrobasilar insufficiency), vascular dementia (e.g., multi-infarct), leukomalacia, periventricular, and vascular headache (e.g., cluster headache or migraines).

[0630] In accordance with yet a further aspect of the present invention, there is provided a process for utilizing polynucleotides or polypeptides, as well as agonists or antagonists of the present invention, for therapeutic purposes, for example, to stimulate neurological cell proliferation and/or differentiation. Therefore, polynucleotides, polypeptides, agonists and/or antagonists of the invention may be used to treat and/or detect neurologic diseases. Moreover, polynucleotides or polypeptides, or agonists or antagonists of the invention, can be used as a marker or detector of a particular nervous system disease or disorder.

[0631] Examples of neurologic diseases which can be treated or detected with polynucleotides, polypeptides, agonists, and/or antagonists of the present invention include brain diseases, such as metabolic brain diseases which includes phenylketonuria such as maternal phenylketonuria, pyruvate carboxylase deficiency, pyruvate dehydrogenase complex deficiency, Wernicke's Encephalopathy, brain edema, brain neoplasms such as cerebellar neoplasms which include infratentorial neoplasms, cerebral ventricle neoplasms such as choroid plexus neoplasms, hypothalamic neoplasms, supratentorial neoplasms, canavan disease, cerebellar diseases such as cerebellar ataxia which include spinocerebellar degeneration such as ataxia telangiectasia, cerebellar dyssynergia, Friederich's Ataxia, Machado-Joseph Disease, olivopontocerebellar atrophy, cerebellar neoplasms such as infratentorial neoplasms, diffuse cerebral sclerosis such as encephalitis periaxialis, globoid cell leukodystrophy, metachromatic leukodystrophy and subacute sclerosing panencephalitis.

[0632] Additional neurologic diseases which can be treated or detected with polynucleotides, polypeptides, agonists, and/or antagonists of the present invention include cerebrovascular disorders (such as carotid artery diseases which include carotid artery thrombosis, carotid stenosis and Moyamoya Disease), cerebral amyloid angiopathy, cerebral aneurysm, cerebral anoxia, cerebral arteriosclerosis, cerebral arteriovenous malformations, cerebral artery diseases, cerebral embolism and thrombosis such as carotid artery thrombosis, sinus thrombosis and Wallenberg's Syndrome, cerebral hemorrhage such as epidural hematoma, subdural hematoma and subarachnoid hemorrhage, cerebral infarction, cerebral ischemia such as transient cerebral ischemia, Subclavian Steal Syndrome and vertebrobasilar insufficiency, vascular dementia such as multi-infarct dementia, periventricular leukomalacia, vascular headache such as cluster headache and migraine.

[0633] Additional neurologic diseases which can be treated or detected with polynucleotides, polypeptides, agonists, and/or antagonists of the present invention include dementia such as AIDS Dementia Complex, presenile dementia such as Alzheimer's Disease and Creutzfeldt-Jakob Syndrome, senile dementia such as Alzheimer's Disease and progressive supranuclear palsy, vascular dementia such as multi-infarct dementia, encephalitis which include encephalitis periaxialis, viral encephalitis such as epidemic encephalitis, Japanese Encephalitis, St. Louis Encephalitis, tick-borne encephalitis and West Nile Fever, acute disseminated encephalomyelitis, meningoencephalitis such as uveomeningoencephalitic syndrome, Postencephalitic Parkinson Disease and subacute sclerosing panencephalitis, encephalomalacia such as periventricular leukomalacia, epilepsy such as generalized epilepsy which includes infantile spasms, absence epilepsy, myoclonic epilepsy which includes MERRF Syndrome, tonic-clonic epilepsy, partial epilepsy such as complex partial epilepsy, frontal lobe epilepsy and temporal lobe epilepsy, post-traumatic epilepsy, status epilepticus such as Epilepsia Partialis Continua, and Hallervorden-Spatz Syndrome.

[0634] Additional neurologic diseases which can be treated or detected with polynucleotides, polypeptides, agonists, and/or antagonists of the present invention include hydrocephalus such as Dandy-Walker Syndrome and normal pressure hydrocephalus, hypothalamic diseases such as hypothalamic neoplasms, cerebral malaria, narcolepsy which includes cataplexy, bulbar poliomyelitis, cerebri pseudotumor, Rett Syndrome, Reye's Syndrome, thalamic diseases, cerebral toxoplasmosis, intracranial tuberculoma and Zellweger Syndrome, central nervous system infections such as AIDS Dementia Complex, Brain Abscess, subdural empyema, encephalomyelitis such as Equine Encephalomyelitis, Venezuelan Equine Encephalomyelitis, Necrotizing Hemorrhagic Encephalomyelitis, Visna, and cerebral malaria.

[0635] Additional neurologic diseases which can be treated or detected with polynucleotides, polypeptides, agonists, and/or antagonists of the present invention inlude meningitis such as arachnoiditis, aseptic meningtitis such as viral meningtitis which includes lymphocytic choriomeningitis, Bacterial meningtitis which includes Haemophilus Meningtitis, Listeria Meningtitis, Meningococcal Meningtitis such as Waterhouse-Friderichsen Syndrome, Pneumococcal Meningtitis and meningeal tuberculosis, fungal meningitis such as Cryptococcal Meningtitis, subdural effusion, meningoencephalitis such as uvemeningoencephalitic syndrome, myelitis such as transverse myelitis, neurosyphilis such as tabes dorsalis, poliomyelitis which includes bulbar poliomyelitis and postpoliomyelitis syndrome, prion diseases (such as Creutzfeldt-Jakob Syndrome, Bovine Spongiform Encephalopathy, Gerstmann-Straussler Syndrome, Kuru, Scrapie), and cerebral toxoplasmosis.

[0636] Additional neurologic diseases which can be treated or detected with polynucleotides, polypeptides, agonists, and/or antagonists of the present invention include central nervous system neoplasms such as brain neoplasms that include cerebellar neoplasms such as infratentorial neoplasms, cerebral ventricle neoplasms such as choroid plexus neoplasms, hypothalamic neoplasms and supratentorial neoplasms, meningeal neoplasms, spinal cord neoplasms which include epidural neoplasms, demyelinating diseases such as Canavan Diseases, diffuse cerebral sceloris which includes adrenoleukodystrophy, encephalitis periaxialis, globoid cell leukodystrophy, diffuse cerebral sclerosis such as metachromatic leukodystrophy, allergic encephalomyelitis, necrotizing hemorrhagic encephalomyelitis, progressive multifocal leukoencephalopathy, multiple sclerosis, central pontine myelinolysis, transverse myelitis, neuromyelitis optica, Scrapie, Swayback, Chronic Fatigue Syndrome, Visna, High Pressure Nervous Syndrome, Meningism, spinal cord diseases such as amyotonia congenita, amyotrophic lateral sclerosis, spinal muscular atrophy such as Werdnig-Hoffmann Disease, spinal cord compression, spinal cord neoplasms such as epidural neoplasms, syringomyelia, Tabes Dorsalis, Stiff-Man Syndrome, mental retardation such as Angelman Syndrome, Cri-du-Chat Syndrome, De Lange's Syndrome, Down Syndrome, Gangliosidoses such as gangliosidoses G(M1), Sandhoff Disease, Tay-Sachs Disease, Hartnup Disease, homocystinuria, Laurence-Moon- Biedl Syndrome, Lesch-Nyhan Syndrome, Maple Syrup Urine Disease, mucolipidosis such as fucosidosis, neuronal ceroid-lipofuscinosis, oculocerebrorenal syndrome, phenylketonuria such as maternal phenylketonuria, Prader-Willi Syndrome, Rett Syndrome, Rubinstein-Taybi Syndrome, Tuberous Sclerosis, WAGR Syndrome, nervous system abnormalities such as holoprosencephaly, neural tube defects such as anencephaly which includes hydrangencephaly, Arnold-Chairi Deformity, encephalocele, meningocele, meningomyelocele, spinal dysraphism such as spina bifida cystica and spina bifida occulta.

[0637] Additional neurologic diseases which can be treated or detected with polynucleotides, polypeptides, agonists, and/or antagonists of the present invention include hereditary motor and sensory neuropathies which include Charcot-Marie Disease, Hereditary optic atrophy, Refsum's Disease, hereditary spastic paraplegia, Werdnig-Hoffmann Disease, Hereditary Sensory and Autonomic Neuropathies such as Congenital Analgesia and Familial Dysautonomia, Neurologic manifestations (such as agnosia that include Gerstmann's Syndrome, Amnesia such as retrograde amnesia, apraxia, neurogenic bladder, cataplexy, communicative disorders such as hearing disorders that includes deafness, partial hearing loss, loudness recruitment and tinnitus, language disorders such as aphasia which include agraphia, anomia, broca aphasia, and Wernicke Aphasia, Dyslexia such as Acquired Dyslexia, language development disorders, speech disorders such as aphasia which includes anomia, broca aphasia and Wernicke Aphasia, articulation disorders, communicative disorders such as speech disorders which include dysarthria, echolalia, mutism and stuttering, voice disorders such as aphonia and hoarseness, decerebrate state, delirium, fasciculation, hallucinations, meningism, movement disorders such as angelman syndrome, ataxia, athetosis, chorea, dystonia, hypokinesia, muscle hypotonia, myoclonus, tic, torticollis and tremor, muscle hypertonia such as muscle rigidity such as stiff-man syndrome, muscle spasticity, paralysis such as facial paralysis which includes Herpes Zoster Oticus, Gastroparesis, Hemiplegia, ophthalmoplegia such as diplopia, Duane's Syndrome, Homer's Syndrome, Chronic progressive external ophthalmoplegia such as Kearns Syndrome, Bulbar Paralysis, Tropical Spastic Paraparesis, Paraplegia such as Brown-Sequard Syndrome, quadriplegia, respiratory paralysis and vocal cord paralysis, paresis, phantom limb, taste disorders such as ageusia and dysgeusia, vision disorders such as amblyopia, blindness, color vision defects, diplopia, hemianopsia, scotoma and subnormal vision, sleep disorders such as hypersomnia which includes Kleine-Levin Syndrome, insomnia, and somnambulism, spasm such as trismus, unconsciousness such as coma, persistent vegetative state and syncope and vertigo, neuromuscular diseases such as amyotonia congenita, amyotrophic lateral sclerosis, Lambert-Eaton Myasthenic Syndrome, motor neuron disease, muscular atrophy such as spinal muscular atrophy, Charcot-Marie Disease and Werdnig-Hoffmann Disease, Postpoliomyelitis Syndrome, Muscular Dystrophy, Myasthenia Gravis, Myotonia Atrophica, Myotonia Confenita, Nemaline Myopathy, Familial Periodic Paralysis, Multiplex Paramyloclonus, Tropical Spastic Paraparesis and Stiff-Man Syndrome, peripheral nervous system diseases such as acrodynia, amyloid neuropathies, autonomic nervous system diseases such as Adie's Syndrome, Barre-Lieou Syndrome, Familial Dysautonomia, Homer's Syndrome, Reflex Sympathetic Dystrophy and Shy-Drager Syndrome, Cranial Nerve Diseases such as Acoustic Nerve Diseases such as Acoustic Neuroma which includes Neurofibromatosis 2, Facial Nerve Diseases such as Facial Neuralgia, Melkersson-Rosenthal Syndrome, ocular motility disorders which includes amblyopia, nystagmus, oculomotor nerve paralysis, ophthalmoplegia such as Duane's Syndrome, Homer's Syndrome, Chronic Progressive External Ophthalmoplegia which includes Kearns Syndrome, Strabismus such as Esotropia and Exotropia, Oculomotor Nerve Paralysis, Optic Nerve Diseases such as Optic Atrophy which includes Hereditary Optic Atrophy, Optic Disk Drusen, Optic Neuritis such as Neuromyelitis Optica, Papilledema, Trigeminal Neuralgia, Vocal Cord Paralysis, Demyelinating Diseases such as Neuromyelitis Optica and Swayback, and Diabetic neuropathies such as diabetic foot.

[0638] Additional neurologic diseases which can be treated or detected with polynucleotides, polypeptides, agonists, and/or antagonists of the present invention include nerve compression syndromes such as carpal tunnel syndrome, tarsal tunnel syndrome, thoracic outlet syndrome such as cervical rib syndrome, ulnar nerve compression syndrome, neuralgia such as causalgia, cervico-brachial neuralgia, facial neuralgia and trigeminal neuralgia, neuritis such as experimental allergic neuritis, optic neuritis, polyneuritis, polyradiculoneuritis and radiculities such as polyradiculitis, hereditary motor and sensory neuropathies such as Charcot-Marie Disease, Hereditary Optic Atrophy, Refsum's Disease, Hereditary Spastic Paraplegia and Werdnig-Hoffmann Disease, Hereditary Sensory and Autonomic Neuropathies which include Congenital Analgesia and Familial Dysautonomia, POEMS Syndrome, Sciatica, Gustatory Sweating and Tetany).

[0639] Endocrine Disorders

[0640] Polynucleotides or polypeptides, or agonists or antagonists of the present invention, may be used to treat, prevent, diagnose, and/or prognose disorders and/or diseases related to hormone imbalance, and/or disorders or diseases of the endocrine system.

[0641] Hormones secreted by the glands of the endocrine system control physical growth, sexual function, metabolism, and other functions. Disorders may be classified in two ways: disturbances in the production of hormones, and the inability of tissues to respond to hormones. The etiology of these hormone imbalance or endocrine system diseases, disorders or conditions may be genetic, somatic, such as cancer and some autoimmune diseases, acquired (e.g., by chemotherapy, injury or toxins), or infectious. Moreover, polynucleotides, polypeptides, antibodies, and/or agonists or antagonists of the present invention can be used as a marker or detector of a particular disease or disorder related to the endocrine system and/or hormone imbalance.

[0642] Endocrine system and/or hormone imbalance and/or diseases encompass disorders of uterine motility including, but not limited to: complications with pregnancy and labor (e.g., pre-term labor, post-term pregnancy, spontaneous abortion, and slow or stopped labor); and disorders and/or diseases of the menstrual cycle (e.g., dysmenorrhea and endometriosis).

[0643] Endocrine system and/or hormone imbalance disorders and/or diseases include disorders and/or diseases of the pancreas, such as, for example, diabetes mellitus, diabetes insipidus, congenital pancreatic agenesis, pheochromocytoma--islet cell tumor syndrome; disorders and/or diseases of the adrenal glands such as, for example, Addison's Disease, corticosteroid deficiency, virilizing disease, hirsutism, Cushing's Syndrome, hyperaldosteronism, pheochromocytoma; disorders and/or diseases of the pituitary gland, such as, for example, hyperpituitarism, hypopituitarism, pituitary dwarfism, pituitary adenoma, panhypopituitarism, acromegaly, gigantism; disorders and/or diseases of the thyroid, including but not limited to, hyperthyroidism, hypothyroidism, Plummer's disease, Graves' disease (toxic diffuse goiter), toxic nodular goiter, thyroiditis (Hashimoto's thyroiditis, subacute granulomatous thyroiditis, and silent lymphocytic thyroiditis), Pendred's syndrome, myxedema, cretinism, thyrotoxicosis, thyroid hormone coupling defect, thymic aplasia, Hurthle cell tumours of the thyroid, thyroid cancer, thyroid carcinoma, Medullary thyroid carcinoma; disorders and/or diseases of the parathyroid, such as, for example, hyperparathyroidism, hypoparathyroidism; disorders and/or diseases of the hypothalamus.

[0644] In addition, endocrine system and/or hormone imbalance disorders and/or diseases may also include disorders and/or diseases of the testes or ovaries, including cancer. Other disorders and/or diseases of the testes or ovaries further include, for example, ovarian cancer, polycystic ovary syndrome, Klinefelter's syndrome, vanishing testes syndrome (bilateral anorchia), congenital absence of Leydig's cells, cryptorchidism, Noonan's syndrome, myotonic dystrophy, capillary haemangioma of the testis (benign), neoplasias of the testis and neo-testis.

[0645] Moreover, endocrine system and/or hormone imbalance disorders and/or diseases may also include disorders and/or diseases such as, for example, polyglandular deficiency syndromes, pheochromocytoma, neuroblastoma, multiple Endocrine neoplasia, and disorders and/or cancers of endocrine tissues.

[0646] Reproductive System Disorders

[0647] The polynucleotides or polypeptides, or agonists or antagonists of the invention may be used for the diagnosis, treatment, or prevention of diseases and/or disorders of the reproductive system. Reproductive system disorders that can be treated by the compositions of the invention, include, but are not limited to, reproductive system injuries, infections, neoplastic disorders, congenital defects, and diseases or disorders which result in infertility, complications with pregnancy, labor, or parturition, and postpartum difficulties.

[0648] Reproductive system disorders and/or diseases include diseases and/or disorders of the testes, including, but not limited to, testicular atrophy, testicular feminization, cryptorchism (unilateral and bilateral), anorchia, ectopic testis, epididymitis and orchitis (typically resulting from infections such as, for example, gonorrhea, mumps, tuberculosis, and syphilis), testicular torsion, vasitis nodosa, germ cell tumors (e.g., seminomas, embryonal cell carcinomas, teratocarcinomas, choriocarcinomas, yolk sac tumors, and teratomas), stromal tumors (e.g., Leydig cell tumors), hydrocele, hematocele, varicocele, spermatocele, inguinal hernia, and disorders of sperm production (e.g., immotile cilia syndrome, aspermia, asthenozoospermia, azoospermia, oligospermia, and teratozoospermia).

[0649] Reproductive system disorders also include, but are not limited to, disorders of the prostate gland, such as acute non-bacterial prostatitis, chronic non-bacterial prostatitis, acute bacterial prostatitis, chronic bacterial prostatitis, prostatodystonia, prostatosis, granulomatous prostatitis, malacoplakia, benign prostatic hypertrophy or hyperplasia, and prostate neoplastic disorders, including adenocarcinomas, transitional cell carcinomas, ductal carcinomas, and squamous cell carcinomas.

[0650] Additionally, the compositions of the invention may be useful in the diagnosis, treatment, and/or prevention of disorders or diseases of the penis and urethra, including, but not limited to, inflammatory disorders, such as balanoposthitis, balanitis xerotica obliterans, phimosis, paraphimosis, syphilis, herpes simplex virus, gonorrhea, non-gonococcal urethritis, chlamydia, mycoplasma, trichomonas, HIV, AIDS, Reiter's syndrome, condyloma acuminatum, condyloma latum, and pearly penile papules; urethral abnormalities, such as hypospadias, epispadias, and phimosis; premalignant lesions, including Erythroplasia of Queyrat, Bowen's disease, Bowenoid paplosis, giant condyloma of Buscke-Lowenstein, and varrucous carcinoma; penile cancers, including squamous cell carcinomas, carcinoma in situ, verrucous carcinoma, and disseminated penile carcinoma; urethral neoplastic disorders, including penile urethral carcinoma, bulbomembranous urethral carcinoma, and prostatic urethral carcinoma; and erectile disorders, such as priapism, Peyronie's disease, erectile dysfunction, and impotence.

[0651] Moreover, diseases and/or disorders of the vas deferens include, but are not limited to, vasculititis and CBAVD (congenital bilateral absence of the vas deferens); additionally, the polynucleotides, polypeptides, and agonists or antagonists of the present invention may be used in the diagnosis, treatment, and/or prevention of diseases and/or disorders of the seminal vesicles, including but not limited to, hydatid disease, congenital chloride diarrhea, and polycystic kidney disease.

[0652] Other disorders and/or diseases of the male reproductive system that may be diagnosed, treated, and/or prevented with the compositions of the invention include, but are not limited to, Klinefelter's syndrome, Young's syndrome, premature ejaculation, diabetes mellitus, cystic fibrosis, Kartagener's syndrome, high fever, multiple sclerosis, and gynecomastia.

[0653] Further, the polynucleotides, polypeptides, and agonists or antagonists of the present invention may be used in the diagnosis, treatment, and/or prevention of diseases and/or disorders of the vagina and vulva, including, but not limited to, bacterial vaginosis, candida vaginitis, herpes simplex virus, chancroid, granuloma inguinale, lymphogranuloma venereum, scabies, human papillomavirus, vaginal trauma, vulvar trauma, adenosis, chlamydia vaginitis, gonorrhea, trichomonas vaginitis, condyloma acuminatum, syphilis, molluscum contagiosum, atrophic vaginitis, Paget's disease, lichen sclerosus, lichen planus, vulvodynia, toxic shock syndrome, vaginismus, vulvovaginitis, vulvar vestibulitis, and neoplastic disorders, such as squamous cell hyperplasia, clear cell carcinoma, basal cell carcinoma, melanomas, cancer of Bartholin's gland, and vulvar intraepithelial neoplasia.

[0654] Disorders and/or diseases of the uterus that may be diagnosed, treated, and/or prevented with the compositions of the invention include, but are not limited to, dysmenorrhea, retroverted uterus, endometriosis, fibroids, adenomyosis, anovulatory bleeding, amenorrhea, Cushing's syndrome, hydatidiform moles, Asherman's syndrome, premature menopause, precocious puberty, uterine polyps, dysfunctional uterine bleeding (e.g., due to aberrant hormonal signals), and neoplastic disorders, such as adenocarcinomas, keiomyosarcomas, and sarcomas. Additionally, the polypeptides, polynucleotides, or agonists or antagonists of the invention may be useful as a marker or detector of, as well as in the diagnosis, treatment, and/or prevention of congenital uterine abnormalities, such as bicomuate uterus, septate uterus, simple unicomuate uterus, unicornuate uterus with a noncavitary rudimentary horn, unicornuate uterus with a non-communicating cavitary rudimentary horn, unicornuate uterus with a communicating cavitary horn, arcuate uterus, uterine didelfus, and T-shaped uterus.

[0655] Ovarian diseases and/or disorders that may be diagnosed, treated, and/or prevented with the compositions of the invention include, but are not limited to, anovulation, polycystic ovary syndrome (Stein-Leventhal syndrome), ovarian cysts, ovarian hypofunction, ovarian insensitivity to gonadotropins, ovarian overproduction of androgens, right ovarian vein syndrome, amenorrhea, hirutism, and ovarian cancer (including, but not limited to, primary and secondary cancerous growth, Sertoli-Leydig tumors, endometriod carcinoma of the ovary, ovarian papillary serous adenocarcinoma, ovarian mucinous adenocarcinoma, and Ovarian Krukenberg tumors).

[0656] Cervical diseases and/or disorders that may be diagnosed, treated, and/or prevented with the compositions of the invention include, but are not limited to, cervicitis, chronic cervicitis, mucopurulent cervicitis, cervical dysplasia, cervical polyps, Nabothian cysts, cervical erosion, cervical incompetence, and cervical neoplasms (including, for example, cervical carcinoma, squamous metaplasia, squamous cell carcinoma, adenosquamous cell neoplasia, and columnar cell neoplasia).

[0657] Additionally, diseases and/or disorders of the reproductive system that may be diagnosed, treated, and/or prevented with the compositions of the invention include, but are not limited to, disorders and/or diseases of pregnancy, including miscarriage and stillbirth, such as early abortion, late abortion, spontaneous abortion, induced abortion, therapeutic abortion, threatened abortion, missed abortion, incomplete abortion, complete abortion, habitual abortion, missed abortion, and septic abortion; ectopic pregnancy, anemia, Rh incompatibility, vaginal bleeding during pregnancy, gestational diabetes, intrauterine growth retardation, polyhydramnios, HELLP syndrome, abruptio placentae, placenta previa, hyperemesis, preeclampsia, eclampsia, herpes gestationis, and urticaria of pregnancy. Additionally, the polynucleotides, polypeptides, and agonists or antagonists of the present invention may be used in the diagnosis, treatment, and/or prevention of diseases that can complicate pregnancy, including heart disease, heart failure, rheumatic heart disease, congenital heart disease, mitral valve prolapse, high blood pressure, anemia, kidney disease, infectious disease (e.g., rubella, cytomegalovirus, toxoplasmosis, infectious hepatitis, chlamydia, HIV, AIDS, and genital herpes), diabetes mellitus, Graves' disease, thyroiditis, hypothyroidism, Hashimoto's thyroiditis, chronic active hepatitis, cirrhosis of the liver, primary biliary cirrhosis, asthma, systemic lupus eryematosis, rheumatoid arthritis, myasthenia gravis, idiopathic thrombocytopenic purpura, appendicitis, ovarian cysts, gallbladder disorders,and obstruction of the intestine.

[0658] Complications associated with labor and parturition that may be diagnosed, treated, and/or prevented with the compositions of the invention include, but are not limited to, premature rupture of the membranes, pre-term labor, post-term pregnancy, postmaturity, labor that progresses too slowly, fetal distress (e.g., abnormal heart rate (fetal or maternal), breathing problems, and abnormal fetal position), shoulder dystocia, prolapsed umbilical cord, amniotic fluid embolism, and aberrant uterine bleeding.

[0659] Further, diseases and/or disorders of the postdelivery period, that may be diagnosed, treated, and/or prevented with the compositions of the invention, include, but are not limited to, endometritis, myometritis, parametritis, peritonitis, pelvic thrombophlebitis, pulmonary embolism, endotoxemia, pyelonephritis, saphenous thrombophlebitis, mastitis, cystitis, postpartum hemorrhage, and inverted uterus.

[0660] Other disorders and/or diseases of the female reproductive system that may be diagnosed, treated, and/or prevented by the polynucleotides, polypeptides, and agonists or antagonists of the present invention include, but are not limited to, Turner's syndrome, pseudohermaphroditism, premenstrual syndrome, pelvic inflammatory disease, pelvic congestion (vascular engorgement), frigidity, anorgasmia, dyspareunia, ruptured fallopian tube, and Mittelschmerz.

[0661] Developmental and Inherited Disorders

[0662] Polynuceotides or polypeptides, or agonists or antagonists of the present invention may be used to treat, prevent, diagnose, and/or prognose diseases associated with mixed fetal tissues, including, but not limited to, developmental and inherited disorders or defects of the nervous system, musculoskelelal system, execretory system, cardiovascular system, hematopoietic system, gastrointestinal system, reproductive system, and respiratory system. Compositions of the present invention may also be used to treat, prevent, diagnose, and/or prognose developmental and inherited disorders or defects associated with, but not limited to, skin, hair, visual, and auditory tissues, metabolism. Additionally, the compositions of the invention may be useful in the diagnosis, treatment, and/or prevention of disorders or diseases associated with, but not limited to, chromosomal or genetic abnormalities and hyperproliferation or neoplasia.

[0663] Disorders or defects of the nervous system associated with developmental or inherited abnormalities that may be diagnosed, treated, and/or prevented with the compostions of the invention include, but are not limited to, adrenoleukodystrophy, agenesis of corpus callosum, Alexander disease, anencephaly, Angelman syndrome, Arnold-Chiari deformity, Batten disease, Canavan disease, cephalic disorders, Charcot-Marie-Tooth disease, encephalocele, Friedreich's ataxia, Gaucher's disease, Gorlin syndrome, Hallervorden-Spatz disease, hereditary spastic paraplegia, Huntington disease, hydranencephaly, hydrocephalus, Joubert syndrome, Lesch-Nyhan syndrome, leukodystrophy, Menkes disease, microcephaly, Niemann-Pick Type Cl, neurofibromatosis, porencephaly, progeria, proteus syndrome, Refsum disease, spina bifida, Sturge-Weber syndrome, Tay-Sachs disease, tuberous sclerosis, and von Hippel-Lindau disease.

[0664] Developmental and inherited disorders resulting in disorders or defects of the musculoskeletal system that may be diagnosed, treated, and/or prevented with the compositions of the invention include, but are not limited to, achondroplasia, atlanto-occipital fusion, arthrogryposis mulitplex congenita, autosomal recessive muscular dystrophy, Becker's muscular dystrophy, cerebral palsy, choanal atresia, cleft lip, cleft palate, clubfoot, congenital amputation, congenital dislocation of the hip, congenital torticollis, congenital scoliosis, dopa-repsonsive dystonia, Duchenne muscular dystrophy, early-onset generalized dystonia, femoral torsion, Gorlin syndrome, hypophosphatasia, Klippel-Feil syndrome, knee dislocation, myoclonic dystonia, myotonic dystrophy, nail-patella syndrome, osteogenesis imperfecta, paroxysmal dystonia, progeria, prune-belly syndrome, rapid-onset dystonia parkinsonism, scolosis, syndactyly, Treacher Collins' syndrome, velocardiofacial syndrome, and X-linked dystonia-parkinsonism.

[0665] Developmental or hereditary disorders or defects of the excretory system that may be diagnosed, treated, and/or prevented with the compositions of the invention include, but are not limited to, Alport's syndrome, Bartter's syndrome, bladder diverticula, bladder exstrophy, cystinuria, epispadias, Fanconi's syndrome, Hartnup disease, horseshoe kidney, hypospadias, kidney agenesis, kidney ectopia, kidney malrotation, Liddle's syndrome, medullary cystic disease, medullary sponge, multicystic kidney, kidney polycystic kidney disease, nail-patella syndrome, Potter's syndrome, urinary tract flow obstruction, vitamin D-resistant rickets, and Wilm's tumor.

[0666] Cardiovascular disorders or defects of developmental or hereditary origin that may be diagnosed, treated, and/or prevented with the compositions of the invention include, but are not limited to, aortic valve stenosis, atrial septal defects, artioventricular (A-V) canal defect, bicuspid aortic valve, coarctation or the aorta, dextrocardia, Ebstein's anomaly, Eisenmenger's complex, hypoplastic left heart syndrome, Marfan syndrome, patent ductus arteriosus, progeria, pulmonary atresia, pulmonary valve stenosis, subaortic stenosis, tetralogy of fallot, total anomalous pulmonary venous (P-V) connection, transposition of the great arteries, tricuspid atresia, truncus arteriosus, ventricular septal defects. Developmental or inherited disorders resulting in disorders involving the hematopoietic system that may be diagnosed, treated, and/or prevented with the compositions of the invention include, but not limited to, Bemard-Soulier syndrome, Chediak-Higashi syndrome, hemophilia, Hermansky-Pudlak syndrome, sickle cell anemia, storage pool disease, thromboxane A2 dysfunction, thrombasthenia, and von Willebrand's disease.

[0667] The compositions of the invention may also be used to diagnose, treat, and/or prevent developmental and inherited disorders resulting in disorders or defects of the gastrointestinal system, including, but not limited to, anal atresia, biliary atresia, esophageal atresia, diaphragmatic hernia, Hirschsprung's disease, Meckel's diverticulum, oligohydramnios, omphalocele, polyhydramnios, porphyria, situs inversus viscera. Developmental or inherited disorders resulting in metabolic disorders that may be diagnosed, treated, and/or prevented with the compositions of the invention include, but are not limited to, alpha-i antitrypsin deficiency, cystic fibrosis, hemochromatosis, lysosomal storage disease, phenylketonuria, Wilson's disease, and Zellweger syndrome.

[0668] Disorders of the reproductive system that are developmentally or hereditary related that may also be diagnosed, treated, and/or prevented with the compositions of the invention include, but are not limited to, androgen insensitivity syndrome, ambiguous genitalia, autosomal sex reversal, congenital adreneal hyperplasia, gonadoblastoma, ovarian germ cell cancer, pseudohermphroditism, true hermaphroditism, undescended testis, XX male syndrome, and XY female type gonadal dysgenesis. The compositions of the invention may also be used to diagnose, treat, and/or prevent developmental or inherited respiratory defects including, but not limited to, askin tumor, azygos lobe, congenital diaphragmatic hernia, congenital lobar emphysema, cystic adenomatoid malformation, lobar emphysema, hyaline membrane disease, and pectus excavatum.

[0669] Developmental or inherited disorders may also result from chromosomal or genetic aberration that may be diagnosed, treated, and/or prevented with the compositions of the invention including, but not limited to, 4p- syndrome, cri du chat syndrome, Digeorge syndrome, Down's syndrome, Edward's syndrome, fragile X syndrome, Kinefelter's syndrome, Patau's syndrome, Prader-Willi syndrome, progeria, Turner's syndrome, triple X syndrome, and XYY syndrome. Other developmental disorders that can be diagnosed, treated, and/or prevented with the compositions of the invention, include, but are not limited to, fetal alcohol syndrome, and can be caused by environmental factors surrounding the developing fetus.

[0670] The compositions of the invention may further be able to be used to diagnose, treat, and/or prevent errors in development or a genetic disposition that may result in hyperproliferative disorders or neoplasms, including, but not limited to, acute childhood lymphoblastic leukemia, askin tumor, Beckwith-Wiedemann syndrome, childhood acute myeloid leukemia, childhood brain stem glioma, childhood cerebellar astrocytoma, childhood extracranial germ cell tumors childhood (primary), gonadoblastoma, hepatocellular cancer, childhood Hodgkin's disease, childhood Hodgkin's lymphoma, childhood hypothalamic and visual pathway glioma, childhood (primary) liver cancer, childhood lymphoblastic leukemia, childhood medulloblastoma, childhood non-Hodgkin's lymphoma, childhood pineal and supratentorial primitive neuroectodermal tumors, childhood primary liver cancer, childhood rhabdomyosarcoma, childhood soft tissue sarcoma, Gorlin syndrome, familial multiple endrocrine neoplasia type I, neuroblastoma, ovarian germ cell cancer, pheochromocytoma, retinoblastoma, and Wilm's tumor.

[0671] Polypeptides may be administered using any method known in the art, including, but not limited to, direct needle injection at the delivery site, intravenous injection, topical administration, catheter infusion, biolistic injectors, particle accelerators, gelfoam sponge depots, other commercially available depot materials, osmotic pumps, oral or suppositorial solid pharmaceutical formulations, decanting or topical applications during surgery, aerosol delivery. Such methods are known in the art. Polypeptides may be administered as part of a Therapeutic, described in more detail below. Methods of delivering polynucleotides are described in more detail herein.

[0672] Diseases at the Cellular Level

[0673] Diseases associated with increased cell survival or the inhibition of apoptosis that could be treated or detected by polynucleotides or polypeptides, as well as antagonists or agonists of the present invention, include cancers (such as follicular lymphomas, carcinomas with p53 mutations, and hormone-dependent tumors, including, but not limited to colon cancer, cardiac tumors, pancreatic cancer, melanoma, retinoblastoma, glioblastoma, lung cancer, intestinal cancer, testicular cancer, stomach cancer, neuroblastoma, myxoma, myoma, lymphoma, endothelioma, osteoblastoma, osteoclastoma, osteosarcoma, chondrosarcoma, adenoma, breast cancer, prostate cancer, Kaposi's sarcoma and ovarian cancer); autoimmune disorders (such as, multiple sclerosis, Sjogren's syndrome, Hashimoto's thyroiditis, biliary cirrhosis, Behcet's disease, Crohn's disease, polymyositis, systemic lupus erythematosus and immune-related glomerulonephritis and rheumatoid arthritis) and viral infections (such as herpes viruses, pox viruses and adenoviruses), inflammation, graft v. host disease, acute graft rejection, and chronic graft rejection. In preferred embodiments, polynucleotides, polypeptides, and/or antagonists of the invention are used to inhibit growth, progression, and/or metasis of cancers, in particular those listed above.

[0674] Additional diseases or conditions associated with increased cell survival that could be treated or detected by polynucleotides or polypeptides, or agonists or antagonists of the present invention include, but are not limited to, progression, and/or metastases of malignancies and related disorders such as leukemia (including acute leukemias (e.g., acute lymphocytic leukemia, acute myelocytic leukemia (including myeloblastic, promyelocytic, myelomonocytic, monocytic, and erythroleukemia)) and chronic leukemias (e.g., chronic myelocytic (granulocytic) leukemia and chronic lymphocytic leukemia)), polycythemia vera, lymphomas (e.g., Hodgkin's disease and non-Hodgkin's disease), multiple myeloma, Waldenstrom's macroglobulinemia, heavy chain disease, and solid tumors including, but not limited to, sarcomas and carcinomas such as fibrosarcoma, myxosarcoma, liposarcoma, chondrosarcoma, osteogenic sarcoma, chordoma, angiosarcoma, endotheliosarcoma, lymphangiosarcoma, lymphangioendotheliosarcoma, synovioma, mesothelioma, Ewing's tumor, leiomyosarcoma, rhabdomyosarcoma, colon carcinoma, pancreatic cancer, breast cancer, ovarian cancer, prostate cancer, squamous cell carcinoma, basal cell carcinoma, adenocarcinoma, sweat gland carcinoma, sebaceous gland carcinoma, papillary carcinoma, papillary adenocarcinomas, cystadenocarcinoma, medullary carcinoma, bronchogenic carcinoma, renal cell carcinoma, hepatoma, bile duct carcinoma, choriocarcinoma, seminoma, embryonal carcinoma, Wilm's tumor, cervical cancer, testicular tumor, lung carcinoma, small cell lung carcinoma, bladder carcinoma, epithelial carcinoma, glioma, astrocytoma, medulloblastoma, craniopharyngioma, ependymoma, pinealoma, hemangioblastoma, acoustic neuroma, oligodendroglioma, menangioma, melanoma, neuroblastoma, and retinoblastoma.

[0675] Diseases associated with increased apoptosis that could be treated or detected by polynucleotides or polypeptides, as well as agonists or antagonists of the present invention, include AIDS; neurodegenerative disorders (such as Alzheimer's disease, Parkinson's disease, Amyotrophic lateral sclerosis, Retinitis pigmentosa, Cerebellar degeneration and brain tumor or prior associated disease); autoimmune disorders (such as, multiple sclerosis, Sjogren's syndrome, Hashimoto's thyroiditis, biliary cirrhosis, Behcet's disease, Crohn's disease, polymyositis, systemic lupus erythematosus and immune-related glomerulonephritis and rheumatoid arthritis) myelodysplastic syndromes (such as aplastic anemia), graft v. host disease, ischemic injury (such as that caused by myocardial infarction, stroke and reperfusion injury), liver injury (e.g., hepatitis related liver injury, ischemia/reperfusion injury, cholestosis (bile duct injury) and liver cancer); toxin-induced liver disease (such as that caused by alcohol), septic shock, cachexia and anorexia.

[0676] Wound Healing and Epithelial Cell Proliferation

[0677] In accordance with yet a further aspect of the present invention, there is provided a process for utilizing polynucleotides or polypeptides, as well as agonists or antagonists of the present invention, for therapeutic purposes, for example, to stimulate epithelial cell proliferation and basal keratinocytes for the purpose of wound healing, and to stimulate hair follicle production and healing of dermal wounds. Polynucleotides or polypeptides, as well as agonists or antagonists of the present invention, may be clinically useful in stimulating wound healing including surgical wounds, excisional wounds, deep wounds involving damage of the dermis and epidermis, eye tissue wounds, dental tissue wounds, oral cavity wounds, diabetic ulcers, dermal ulcers, cubitus ulcers, arterial ulcers, venous stasis ulcers, burns resulting from heat exposure or chemicals, and other abnormal wound healing conditions such as uremia, malnutrition, vitamin deficiencies and complications associted with systemic treatment with steroids, radiation therapy and antineoplastic drugs and antimetabolites. Polynucleotides or polypeptides, as well as agonists or antagonists of the present invention, could be used to promote dermal reestablishment subsequent to dermal loss

[0678] Polynucleotides or polypeptides, as well as agonists or antagonists of the present invention, could be used to increase the adherence of skin grafts to a wound bed and to stimulate re-epithelialization from the wound bed. The following are types of grafts that polynucleotides or polypeptides, agonists or antagonists of the present invention, could be used to increase adherence to a wound bed: autografts, artificial skin, allografts, autodermic graft, autoepdermic grafts, avacular grafts, Blair-Brown grafts, bone graft, brephoplastic grafts, cutis graft, delayed graft, dermic graft, epidermic graft, fascia graft, full thickness graft, heterologous graft, xenograft, homologous graft, hyperplastic graft, lamellar graft, mesh graft, mucosal graft, Ollier-Thiersch graft, omenpal graft, patch graft, pedicle graft, penetrating graft, split skin graft, thick split graft. Polynucleotides or polypeptides, as well as agonists or antagonists of the present invention, can be used to promote skin strength and to improve the appearance of aged skin.

[0679] It is believed that polynucleotides or polypeptides, as well as agonists or antagonists of the present invention, will also produce changes in hepatocyte proliferation, and epithelial cell proliferation in the lung, breast, pancreas, stomach, small intesting, and large intestine. Polynucleotides or polypeptides, as well as agonists or antagonists of the present invention, could promote proliferation of epithelial cells such as sebocytes, hair follicles, hepatocytes, type II pneumocytes, mucin-producing goblet cells, and other epithelial cells and their progenitors contained within the skin, lung, liver, and gastrointestinal tract. Polynucleotides or polypeptides, agonists or antagonists of the present invention, may promote proliferation of endothelial cells, keratinocytes, and basal keratinocytes.

[0680] Polynucleotides or polypeptides, as well as agonists or antagonists of the present invention, could also be used to reduce the side effects of gut toxicity that result from radiation, chemotherapy treatments or viral infections. Polynucleotides or polypeptides, as well as agonists or antagonists of the present invention, may have a cytoprotective effect on the small intestine mucosa. Polynucleotides or polypeptides, as well as agonists or antagonists of the present invention, may also stimulate healing of mucositis (mouth ulcers) that result from chemotherapy and viral infections.

[0681] Polynucleotides or polypeptides, as well as agonists or antagonists of the present invention, could further be used in full regeneration of skin in full and partial thickness skin defects, including bums, (i.e., repopulation of hair follicles, sweat glands, and sebaceous glands), treatment of other skin defects such as psoriasis. Polynucleotides or polypeptides, as well as agonists or antagonists of the present invention, could be used to treat epidermolysis bullosa, a defect in adherence of the epidermis to the underlying dermis which results in frequent, open and painful blisters by accelerating reepithelialization of these lesions. Polynucleotides or polypeptides, as well as agonists or antagonists of the present invention, could also be used to treat gastric and doudenal ulcers and help heal by scar formation of the mucosal lining and regeneration of glandular mucosa and duodenal mucosal lining more rapidly. Inflamamatory bowel diseases, such as Crohn's disease and ulcerative colitis, are diseases which result in destruction of the mucosal surface of the small or large intestine, respectively. Thus, polynucleotides or polypeptides, as well as agonists or antagonists of the present invention, could be used to promote the resurfacing of the mucosal surface to aid more rapid healing and to prevent progression of inflammatory bowel disease. Treatment with polynucleotides or polypeptides, agonists or antagonists of the present invention, is expected to have a significant effect on the production of mucus throughout the gastrointestinal tract and could be used to protect the intestinal mucosa from injurious substances that are ingested or following surgery. Polynucleotides or polypeptides, as well as agonists or antagonists of the present invention, could be used to treat diseases associate with the under expression.

[0682] Moreover, polynucleotides or polypeptides, as well as agonists or antagonists of the present invention, could be used to prevent and heal damage to the lungs due to various pathological states. Polynucleotides or polypeptides, as well as agonists or antagonists of the present invention, which could stimulate proliferation and differentiation and promote the repair of alveoli and brochiolar epithelium to prevent or treat acute or chronic lung damage. For example, emphysema, which results in the progressive loss of aveoli, and inhalation injuries, i.e., resulting from smoke inhalation and burns, that cause necrosis of the bronchiolar epithelium and alveoli could be effectively treated using polynucleotides or polypeptides, agonists or antagonists of the present invention. Also, polynucleotides or polypeptides, as well as agonists or antagonists of the present invention, could be used to stimulate the proliferation of and differentiation of type II pneumocytes, which may help treat or prevent disease such as hyaline membrane diseases, such as infant respiratory distress syndrome and bronchopulmonary displasia, in premature infants.

[0683] Polynucleotides or polypeptides, as well as agonists or antagonists of the present invention, could stimulate the proliferation and differentiation of hepatocytes and, thus, could be used to alleviate or treat liver diseases and pathologies such as fulminant liver failure caused by cirrhosis, liver damage caused by viral hepatitis and toxic substances (i.e., acetaminophen, carbon tetraholoride and other hepatotoxins known in the art).

[0684] In addition, polynucleotides or polypeptides, as well as agonists or antagonists of the present invention, could be used treat or prevent the onset of diabetes mellitus. In patients with newly diagnosed Types I and II diabetes, where some islet cell function remains, polynucleotides or polypeptides, as well as agonists or antagonists of the present invention, could be used to maintain the islet function so as to alleviate, delay or prevent permanent manifestation of the disease. Also, polynucleotides or polypeptides, as well as agonists or antagonists of the present invention, could be used as an auxiliary in islet cell transplantation to improve or promote islet cell function.

[0685] Infectious Disease

[0686] Polynucleotides or polypeptides, as well as agonists or antagonists of the present invention can be used to treat or detect infectious agents. For example, by increasing the immune response, particularly increasing the proliferation and differentiation of B and/or T cells, infectious diseases may be treated. The immune response may be increased by either enhancing an existing immune response, or by initiating a new immune response. Alternatively, polynucleotides or polypeptides, as well as agonists or antagonists of the present invention may also directly inhibit the infectious agent, without necessarily eliciting an immune response.

[0687] Viruses are one example of an infectious agent that can cause disease or symptoms that can be treated or detected by a polynucleotide or polypeptide and/or agonist or antagonist of the present invention. Examples of viruses, include, but are not limited to Examples of viruses, include, but are not limited to the following DNA and RNA viruses and viral families: Arbovirus, Adenoviridae, Arenaviridae, Arterivirus, Bimaviridae, Bunyaviridae, Caliciviridae, Circoviridae, Coronaviridae, Dengue, EBV, HIV, Flaviviridae, Hepadnaviridae (Hepatitis), Herpesviridae (such as, Cytomegalovirus, Herpes Simplex, Herpes Zoster), Mononegavirus (e.g., Paramyxoviridae, Morbillivirus, Rhabdoviridae), Orthomyxoviridae (e.g., Influenza A, Influenza B, and parainfluenza), Papiloma virus, Papovaviridae, Parvoviridae, Picornaviridae, Poxviridae (such as Smallpox or Vaccinia), Reoviridae (e.g., Rotavirus), Retroviridae (HTLV-1, HIV-II, Lentivirus), and Togaviridae (e.g., Rubivirus). Viruses falling within these families can cause a variety of diseases or symptoms, including, but not limited to: arthritis, bronchiollitis, respiratory syncytial virus, encephalitis, eye infections (e.g., conjunctivitis, keratitis), chronic fatigue syndrome, hepatitis (A, B, C, E, Chronic Active, Delta), Japanese B encephalitis, Junin, Chikungunya, Rift Valley fever, yellow fever, meningitis, opportunistic infections (e.g., AIDS), pneumonia, Burkitt's Lymphoma, chickenpox, hemorrhagic fever, Measles, Mumps, Parainfluenza, Rabies, the common cold, Polio, leukemia, Rubella, sexually transmitted diseases, skin diseases (e.g., Kaposi's, warts), and viremia. polynucleotides or polypeptides, or agonists or antagonists of the invention, can be used to treat or detect any of these symptoms or diseases. In specific embodiments, polynucleotides, polypeptides, or agonists or antagonists of the invention are used to treat: meningitis, Dengue, EBV, and/or hepatitis (e.g., hepatitis B). In an additional specific embodiment polynucleotides, polypeptides, or agonists or antagonists of the invention are used to treat patients nonresponsive to one or more other commercially available hepatitis vaccines. In a further specific embodiment polynucleotides, polypeptides, or agonists or antagonists of the invention are used to treat AIDS.

[0688] Similarly, bacterial or fungal agents that can cause disease or symptoms and that can be treated or detected by a polynucleotide or polypeptide and/or agonist or antagonist of the present invention include, but are not limited to, the following Gram-Negative and Gram-positive bacteria, bacterial families, and fungi: Actinomyces (e.g., Norcardia), Acinetobacter, Cryptococcus neoformans, Aspergillus, Bacillaceae (e.g., Bacillus anthrasis), Bacteroides (e.g., Bacteroides fragilis), Blastomycosis, Bordetella, Borrelia (e.g., Borrelia burgdorferi), Brucella, Candidia, Campylobacter, Chlamydia, Clostridium (e.g., Clostridium botulinum, Clostridium dificile, Clostridium perfringens, Clostridium tetani), Coccidioides, Corynebacterium (e.g., Corynebacterium diptheriae), Cryptococcus, Dermatocycoses, E. coli (e.g., Enterotoxigenic E. coli and Enterohemorrhagic E. coli), Enterobacter (e.g. Enterobacter aerogenes), Enterobacteriaceae (Klebsiella, Salmonella (e.g., Salmonella typhi, Salmonella enteritidis, Salmonella paratyphi), Serratia, Yersinia, Shigella), Erysipelothrix, Haemophilus (e.g., Haemophilus influenza type B), Helicobacter, Legionella (e.g., Legionella pneumophila), Leptospira, Listeria (e.g., Listeria monocytogenes), Mycoplasma, Mycobacterium (e.g., Mycobacterium leprae and Mycobacterium tuberculosis), Vibrio (e.g., Vibrio cholerae), Neisseriaceae (e.g., Neisseria gonorrhea, Neisseria meningitidis), Pasteurellacea, Proteus, Pseudomonas (e.g., Psuedomonas aeruginosa), Rickettsiaceae, Spirochetes (e.g., Treponema spp., Leptospira spp., Borrelia spp.) Shigella spp., Staphylococcus (e.g., Staphylococcus aureus), Meningiococcus, Pneumococcus and Streptococcus (e.g., Streptococcus pneumoniae and Groups A,B, and C Streptococci), and Ureaplasmas. These bacterial, parasitic, and fungal families can cause diseases or symptoms, including, but not limited to: antibiotic-resistant infections, bacteremia, endocarditis, septicemia, eye infections (conjunctivitis) tuberculosis, uveitis, gingivitis, bacterial diarrhea, opportunistic infections (e.g., AIIDS related infections), paronychia, prosthesis-related infections, dental caries, Reiter's Disease, respiratory tract infections (e.g., Whooping Cough or Empyema), sepsis, Lyme Disease, Cat-Scratch Disease, dysentery, paratyphoid fever, food poisoning, Legionella disease, chronic and acute inflammation, erythema, yeast infections, typhoid, pneumonia, gonorrhea, meningitis (e.g., meningitis types A and B), chlamydia, syphilis, diphtheria, leprosy, burcellosis, peptic ulcers, anthrax, spontaneous abortion, birth defects, lung infections, ear infections, deafness, blindness, lethargy, malaise, vomiting, chronic diarrhea, Crohn's disease, colitis, vaginosis, sterility, pelvic inflammatory disease, candidiasis, paratuberculosis, tuberculosis, lupus, botulism, gangrene, tetanus, impetigo, Rheumatic Fever, Scarlet Fever, sexually transmitted diseases, skin diseases (e.g., cellulitis, dermatocycoses), toxemia, urinary tract infections, wound infections or noscomial infections. Polynucleotides or polypeptides, agonists or antagonists of the invention, can be used to treat or detect any of these symptoms or diseases. In specific embodiments, polynucleotides, polypeptides, agonists or antagonists of the invention are used to treat: tetanus, diptheria, botulism, and/or meningitis type B.

[0689] Moreover, parasitic agents causing disease or symptoms that can be treated or detected by a polynucleotide or polypeptide and/or agonist or antagonist of the present invention include, but not limited to, the following families or class: Amebiasis, Babesiosis, Coccidiosis, Cryptosporidiosis, Dientamoebiasis, Dourine, Ectoparasitic, Giardiasis, Helminthiasis, Leishmaniasis, Theileriasis, Toxoplasmosis, Trypanosomiasis, and Trichomonas and Sporozoans (e.g., Plasmodium virax, Plasmodium falciparium, Plasmodium malariae and Plasmodium ovale). These parasites can cause a variety of diseases or symptoms, including, but not limited to: Scabies, Trombiculiasis, eye infections, intestinal disease (e.g., dysentery, giardiasis), liver disease, lung disease, opportunistic infections (e.g., AIDS related), malaria, pregnancy complications, and toxoplasmosis. polynucleotides or polypeptides, or agonists or antagonists of the invention, can be used to treat or detect any of these symptoms or diseases.

[0690] Polynucleotides or polypeptides, as well as agonists or antagonists of the present invention of the present invention could either be by administering an effective amount of a polypeptide to the patient, or by removing cells from the patient, supplying the cells with a polynucleotide of the present invention, and returning the engineered cells to the patient (ex vivo therapy). Moreover, the polypeptide or polynucleotide of the present invention can be used as an antigen in a vaccine to raise an immune response against infectious disease.

[0691] Regeneration

[0692] Polynucleotides or polypeptides, as well as agonists or antagonists of the present invention can be used to differentiate, proliferate, and attract cells, leading to the regeneration of tissues. (See, Science 276:59-87 (1997).) The regeneration of tissues could be used to repair, replace, or protect tissue damaged by congenital defects, trauma (wounds, burns, incisions, or ulcers), age, disease (e.g. osteoporosis, osteocarthritis, periodontal disease, liver failure), surgery, including cosmetic plastic surgery, fibrosis, reperfusion injury, or systemic cytokine damage.

[0693] Tissues that could be regenerated using the present invention include organs (e.g., pancreas, liver, intestine, kidney, skin, endothelium), muscle (smooth, skeletal or cardiac), vasculature (including vascular and lymphatics), nervous, hematopoietic, and skeletal (bone, cartilage, tendon, and ligament) tissue. Preferably, regeneration occurs without or decreased scarring. Regeneration also may include angiogenesis.

[0694] Moreover, polynucleotides or polypeptides, as well as agonists or antagonists of the present invention, may increase regeneration of tissues difficult to heal. For example, increased tendon/ligament regeneration would quicken recovery time after damage. Polynucleotides or polypeptides, as well as agonists or antagonists of the present invention could also be used prophylactically in an effort to avoid damage. Specific diseases that could be treated include of tendinitis, carpal tunnel syndrome, and other tendon or ligament defects. A further example of tissue regeneration of non-healing wounds includes pressure ulcers, ulcers associatedwith vascular insufficiency, surgical, and traumatic wounds.

[0695] Similarly, nerve and brain tissue could also be regenerated by using polynucleotides or polypeptides, as well as agonists or antagonists of the present invention, to proliferate and differentiate nerve cells. Diseases that could be treated using this method include central and peripheral nervous system diseases, neuropathies, or mechanical and traumatic disorders (e.g., spinal cord disorders, head trauma, cerebrovascular disease, and stoke). Specifically, diseases associated with peripheral nerve injuries, peripheral neuropathy (e.g., resulting from chemotherapy or other medical therapies), localized neuropathies, and central nervous system diseases (e.g., Alzheimer's disease, Parkinson's disease, Huntington's disease, amyotrophic lateral sclerosis, and Shy-Drager syndrome), could all be treated using the polynucleotides or polypeptides, as well as agonists or antagonists of the present invention.

[0696] Chemotaxis

[0697] Polynucleotides or polypeptides, as well as agonists or antagonists of the present invention may have chemotaxis activity. A chemotaxic molecule attracts or mobilizes cells (e.g., monocytes, fibroblasts, neutrophils, T-cells, mast cells, eosinophils, epithelial and/or endothelial cells) to a particular site in the body, such as inflammation, infection, or site of hyperproliferation. The mobilized cells can then fight off and/or heal the particular trauma or abnormality.

[0698] Polynucleotides or polypeptides, as well as agonists or antagonists of the present invention may increase chemotaxic activity of particular cells. These chemotactic molecules can then be used to treat inflammation, infection, hyperproliferative disorders, or any immune system disorder by increasing the number of cells targeted to a particular location in the body. For example, chemotaxic molecules can be used to treat wounds and other trauma to tissues by attracting immune cells to the injured location. Chemotactic molecules of the present invention can also attract fibroblasts, which can be used to treat wounds.

[0699] It is also contemplated that polynucleotides or polypeptides, as well as agonists or antagonists of the present invention may inhibit chemotactic activity. These molecules could also be used to treat disorders. Thus, polynucleotides or polypeptides, as well as agonists or antagonists of the present invention could be used as an inhibitor of chemotaxis.

[0700] Binding Activity

[0701] A polypeptide of the present invention may be used to screen for molecules that bind to the polypeptide or for molecules to which the polypeptide binds. The binding of the polypeptide and the molecule may activate (agonist), increase, inhibit (antagonist), or decrease activity of the polypeptide or the molecule bound. Examples of such molecules include antibodies, oligonucleotides, proteins (e.g., receptors),or small molecules.

[0702] Preferably, the molecule is closely related to the natural ligand of the polypeptide, e.g., a fragment of the ligand, or a natural substrate, a ligand, a structural or functional mimetic. (See, Coligan et al., Current Protocols in Immunology 1(2):Chapter 5 (1991).) Similarly, the molecule can be closely related to the natural receptor to which the polypeptide binds, or at least, a fragment of the receptor capable of being bound by the polypeptide (e.g., active site). In either case, the molecule can be rationally designed using known techniques.

[0703] Preferably, the screening for these molecules involves producing appropriate cells which express the polypeptide. Preferred cells include cells from mammals, yeast, Drosophila, or E. coli. Cells expressing the polypeptide (or cell membrane containing the expressed polypeptide) are then preferably contacted with a test compound potentially containing the molecule to observe binding, stimulation, or inhibition of activity of either the polypeptide or the molecule.

[0704] The assay may simply test binding of a candidate compound to the polypeptide, wherein binding is detected by a label, or in an assay involving competition with a labeled competitor. Further, the assay may test whether the candidate compound results in a signal generated by binding to the polypeptide.

[0705] Alternatively, the assay can be carried out using cell-free preparations, polypeptide/molecule affixed to a solid support, chemical libraries, or natural product mixtures. The assay may also simply comprise the steps of mixing a candidate compound with a solution containing a polypeptide, measuring polypeptide/molecule activity or binding, and comparing the polypeptide/molecule activity or binding to a standard.

[0706] Preferably, an ELISA assay can measure polypeptide level or activity in a sample (e.g., biological sample) using a monoclonal or polyclonal antibody. The antibody can measure polypeptide level or activity by either binding, directly or indirectly, to the polypeptide or by competing with the polypeptide for a substrate.

[0707] Additionally, the receptor to which the polypeptide of the present invention binds can be identified by numerous methods known to those of skill in the art, for example, ligand panning and FACS sorting (Coligan, et al., Current Protocols in Immun., 1(2), Chapter 5, (1991)). For example, expression cloning is employed wherein polyadenylated RNA is prepared from a cell responsive to the polypeptides, for example, NIH3T3 cells which are known to contain multiple receptors for the FGF family proteins, and SC-3 cells, and a cDNA library created from this RNA is divided into pools and used to transfect COS cells or other cells that are not responsive to the polypeptides. Transfected cells which are grown on glass slides are exposed to the polypeptide of the present invention, after they have been labelled. The polypeptides can be labeled by a variety of means including iodination or inclusion of a recognition site for a site-specific protein kinase.

[0708] Following fixation and incubation, the slides are subjected to auto-radiographic analysis. Positive pools are identified and sub-pools are prepared and re-transfected using an iterative sub-pooling and re-screening process, eventually yielding a single clones that encodes the putative receptor.

[0709] As an alternative approach for receptor identification, the labeled polypeptides can be photoaffinity linked with cell membrane or extract preparations that express the receptor molecule. Cross-linked material is resolved by PAGE analysis and exposed to X-ray film. The labeled complex containing the receptors of the polypeptides can be excised, resolved into peptide fragments, and subjected to protein microsequencing. The amino acid sequence obtained from microsequencing would be used to design a set of degenerate oligonucleotide probes to screen a cDNA library to identify the genes encoding the putative receptors.

[0710] Moreover, the techniques of gene-shuffling, motif-shuffling, exon-shuffling, and/or codon-shuffling (collectively referred to as “DNA shuffling”) may be employed to modulate the activities of the polypeptide of the present invention thereby effectively generating agonists and antagonists of the polypeptide of the present invention. See generally, U.S. Pat. Nos. 5,605,793, 5,811,238, 5,830,721, 5,834,252, and 5,837,458, and Patten, P. A., et al., Curr. Opinion Biotechnol. 8:724-33 (1997); Harayama, S. Trends Biotechnol. 16(2):76-82 (1998); Hansson, L. O., et al., J. Mol. Biol. 287:265-76 (1999); and Lorenzo, M. M. and Blasco, R. Biotechniques 24(2):308-13 (1998) (each of these patents and publications are hereby incorporated by reference). In one embodiment, alteration of polynucleotides and corresponding polypeptides may be achieved by DNA shuffling. DNA shuffling involves the assembly of two or more DNA segments into a desired molecule by homologous, or site-specific, recombination. In another embodiment, polynucleotides and corresponding polypeptides may be alterred by being subjected to random mutagenesis by error-prone PCR, random nucleotide insertion or other methods prior to recombination. In another embodiment, one or more components, motifs, sections, parts, domains, fragments, etc., of the polypeptide of the present invention may be recombined with one or more components, motifs, sections, parts, domains, fragments, etc. of one or more heterologous molecules. In preferred embodiments, the heterologous molecules are family members. In further preferred embodiments, the heterologous molecule is a growth factor such as, for example, platelet-derived growth factor (PDGF), insulin-like growth factor (IGF-1), transforming growth factor (TGF)-alpha, epidermal growth factor (EGF), fibroblast growth factor (FGF), TGF-beta, bone morphogenetic protein (BMP)-2, BMP-4, BMP-5, BMP-6, BMP-7, activins A and B, decapentaplegic(dpp), 60A, OP-2, dorsalin, growth differentiation factors (GDFs), nodal, MIS, inhibin-alpha, TGF-betal, TGF-beta2, TGF-beta3, TGF-beta5, and glial-derived neurotrophic factor (GDNF).

[0711] Other preferred fragments are biologically active fragments of the polypeptide of the present invention. Biologically active fragments are those exhibiting activity similar, but not necessarily identical, to an activity of the polypeptide of the present invention. The biological activity of the fragments may include an improved desired activity, or a decreased undesirable activity.

[0712] Additionally, this invention provides a method of screening compounds to identify those which modulate the action of the polypeptide of the present invention. An example of such an assay comprises combining a mammalian fibroblast cell, a the polypeptide of the present invention, the compound to be screened and 3[H] thymidine under cell culture conditions where the fibroblast cell would normally proliferate. A control assay may be performed in the absence of the compound to be screened and compared to the amount of fibroblast proliferation in the presence of the compound to determine if the compound stimulates proliferation by determining the uptake of ³[H] thymidine in each case. The amount of fibroblast cell proliferation is measured by liquid scintillation chromatography which measures the incorporation of ³[H] thymidine. Both agonist and antagonist compounds may be identified by this procedure.

[0713] In another method, a mammalian cell or membrane preparation expressing a receptor for a polypeptide of the present invention is incubated with a labeled polypeptide of the present invention in the presence of the compound. The ability of the compound to enhance or block this interaction could then be measured. Alternatively, the response of a known second messenger system following interaction of a compound to be screened and the receptor is measured and the ability of the compound to bind to the receptor and elicit a second messenger response is measured to determine if the compound is a potential agonist or antagonist. Such second messenger systems include but are not limited to, cAMP guanylate cyclase, ion channels or phosphoinositide hydrolysis.

[0714] All of these above assays can be used as diagnostic or prognostic markers. The molecules discovered using these assays can be used to treat disease or to bring about a particular result in a patient (e.g., blood vessel growth) by activating or inhibiting the polypeptide/molecule. Moreover, the assays can discover agents which may inhibit or enhance the production of the polypeptides of the invention from suitably manipulated cells or tissues.

[0715] Therefore, the invention includes a method of identifying compounds which bind to a polypeptide of the invention comprising the steps of: (a) incubating a candidate binding compound with a polypeptide of the present invention; and (b) determining if binding has occurred. Moreover, the invention includes a method of identifying agonists/antagonists comprising the steps of: (a) incubating a candidate compound with a polypeptide of the present invention, (b) assaying a biological activity, and (b) determining if a biological activity of the polypeptide has been altered.

[0716] Targeted Delivery

[0717] In another embodiment, the invention provides a method of delivering compositions to targeted cells expressing a receptor for a polypeptide of the invention, or cells expressing a cell bound form of a polypeptide of the invention.

[0718] As discussed herein, polypeptides or antibodies of the invention may be associated with heterologous polypeptides, heterologous nucleic acids, toxins, or prodrugs via hydrophobic, hydrophilic, ionic and/or covalent interactions. In one embodiment, the invention provides a method for the specific delivery of compositions of the invention to cells by administering polypeptides of the invention (including antibodies) that are associated with heterologous polypeptides or nucleic acids. In one example, the invention provides a method for delivering a therapeutic protein into the targeted cell. In another example, the invention provides a method for delivering a single stranded nucleic acid (e.g., antisense or ribozymes) or double stranded nucleic acid (e.g., DNA that can integrate into the cell's genome or replicate episomally and that can be transcribed) into the targeted cell.

[0719] In another embodiment, the invention provides a method for the specific destruction of cells (e.g., the destruction of tumor cells) by administering polypeptides of the invention (e.g., polypeptides of the invention or antibodies of the invention) in association with toxins or cytotoxic prodrugs.

[0720] By “toxin” is meant compounds that bind and activate endogenous cytotoxic effector systems, radioisotopes, holotoxins, modified toxins, catalytic subunits of toxins, or any molecules or enzymes not normally present in or on the surface of a cell that under defined conditions cause the cell's death. Toxins that may be used according to the methods of the invention include, but are not limited to, radioisotopes known in the art, compounds such as, for example, antibodies (or complement fixing containing portions thereof) that bind an inherent or induced endogenous cytotoxic effector system, thymidine kinase, endonuclease, RNAse, alpha toxin, ricin, abrin, Pseudomonas exotoxin A, diphtheria toxin, saporin, momordin, gelonin, pokeweed antiviral protein, alpha-sarcin and cholera toxin. By “cytotoxic prodrug” is meant a non-toxic compound that is converted by an enzyme, normally present in the cell, into a cytotoxic compound. Cytotoxic prodrugs that may be used according to the methods of the invention include, but are not limited to, glutamyl derivatives of benzoic acid mustard alkylating agent, phosphate derivatives of etoposide or mitomycin C, cytosine arabinoside, daunorubisin, and phenoxyacetamide derivatives of doxorubicin.

[0721] Drug Screening

[0722] Further contemplated is the use of the polypeptides of the present invention, or the polynucleotides encoding these polypeptides, to screen for molecules which modify the activities of the polypeptides of the present invention. Such a method would include contacting the polypeptide of the present invention with a selected compound(s) suspected of having antagonist or agonist activity, and assaying the activity of these polypeptides following binding.

[0723] This invention is particularly useful for screening therapeutic compounds by using the polypeptides of the present invention, or binding fragments thereof, in any of a variety of drug screening techniques. The polypeptide or fragment employed in such a test may be affixed to a solid support, expressed on a cell surface, free in solution, or located intracellularly. One method of drug screening utilizes eukaryotic or prokaryotic host cells which are stably transformed with recombinant nucleic acids expressing the polypeptide or fragment. Drugs are screened against such transformed cells in competitive binding assays. One may measure, for example, the formulation of complexes between the agent being tested and a polypeptide of the present invention.

[0724] Thus, the present invention provides methods of screening for drugs or any other agents which affect activities mediated by the polypeptides of the present invention. These methods comprise contacting such an agent with a polypeptide of the present invention or a fragment thereof and assaying for the presence of a complex between the agent and the polypeptide or a fragment thereof, by methods well known in the art. In such a competitive binding assay, the agents to screen are typically labeled. Following incubation, free agent is separated from that present in bound form, and the amount of free or uncomplexed label is a measure of the ability of a particular agent to bind to the polypeptides of the present invention.

[0725] Another technique for drug screening provides high throughput screening for compounds having suitable binding affinity to the polypeptides of the present invention, and is described in great detail in European Patent Application 84/03564, published on Sep. 13, 1984, which is incorporated herein by reference herein. Briefly stated, large numbers of different small peptide test compounds are synthesized on a solid substrate, such as plastic pins or some other surface. The peptide test compounds are reacted with polypeptides of the present invention and washed. Bound polypeptides are then detected by methods well known in the art. Purified polypeptides are coated directly onto plates for use in the aforementioned drug screening techniques. In addition, non-neutralizing antibodies may be used to capture the peptide and immobilize it on the solid support.

[0726] This invention also contemplates the use of competitive drug screening assays in which neutralizing antibodies capable of binding polypeptides of the present invention specifically compete with a test compound for binding to the polypeptides or fragments thereof. In this manner, the antibodies are used to detect the presence of any peptide which shares one or more antigenic epitopes with a polypeptide of the invention.

[0727] Antisense And Ribozyme (Antagonists)

[0728] In specific embodiments, antagonists according to the present invention are nucleic acids corresponding to the sequences contained in SEQ ID NO:X, or the complementary strand thereof, and/or to nucleotide sequences contained in the cDNA contained in the related cDNA clone identified in Table 1. In one embodiment, antisense sequence is generated internally, by the organism, in another embodiment, the antisense sequence is separately administered (see, for example, O'Connor, J., Neurochem. 56:560 (1991). Oligodeoxynucleotides as Antisense Inhibitors of Gene Expression, CRC Press, Boca Raton, Fla. (1988). Antisense technology can be used to control gene expression through antisense DNA or RNA, or through triple-helix formation. Antisense techniques are discussed for example, in Okano, J., Neurochem. 56:560 (1991); Oligodeoxynucleotides as Antisense Inhibitors of Gene Expression, CRC Press, Boca Raton, Fla. (1988). Triple helix formation is discussed in, for instance, Lee et al., Nucleic Acids Research 6:3073 (1979); Cooney et al., Science 241:456 (1988); and Dervan et al., Science 251:1300 (1991). The methods are based on binding of a polynucleotide to a complementary DNA or RNA.

[0729] For example, the use of c-myc and c-myb antisense RNA constructs to inhibit the growth of the non-lymphocytic leukemia cell line HL-60 and other cell lines was previously described. (Wickstrom et al. (1988); Anfossi et al. (1989)). These experiments were performed in vitro by incubating cells with the oligoribonucleotide. A similar procedure for in vivo use is described in WO 91/15580. Briefly, a pair of oligonucleotides for a given antisense RNA is produced as follows: A sequence complimentary to the first 15 bases of the open reading frame is flanked by an EcoR1 site on the 5 end and a HindIII site on the 3 end. Next, the pair of oligonucleotides is heated at 90° C. for one minute and then annealed in 2× ligation buffer (20 mM TRIS HCI pH 7.5, 10 mM MgCl2, 10 MM dithiothreitol (DTT) and 0.2 mM ATP) and then ligated to the EcoR1/Hind III site of the retroviral vector PMV7 (WO 91/15580).

[0730] For example, the 5′ coding portion of a polynucleotide that encodes the polypeptide of the present invention may be used to design an antisense RNA oligonucleotide of from about 10 to 40 base pairs in length. A DNA oligonucleotide is designed to be complementary to a region of the gene involved in transcription thereby preventing transcription and the production of the receptor. The antisense RNA oligonucleotide hybridizes to the mRNA in vivo and blocks translation of the mRNA molecule into receptor polypeptide.

[0731] In one embodiment, the antisense nucleic acid of the invention is produced intracellularly by transcription from an exogenous sequence. For example, a vector or a portion thereof, is transcribed, producing an antisense nucleic acid (RNA) of the invention. Such a vector would contain a sequence encoding the antisense nucleic acid. Such a vector can remain episomal or become chromosomally integrated, as long as it can be transcribed to produce the desired antisense RNA. Such vectors can be constructed by recombinant DNA technology methods standard in the art. Vectors can be plasmid, viral, or others known in the art, used for replication and expression in vertebrate cells. Expression of the sequence encoding the polypeptide of the present invnetion or fragments thereof, can be by any promoter known in the art to act in vertebrate, preferably human cells. Such promoters can be inducible or constitutive. Such promoters include, but are not limited to, the SV40 early promoter region (Bernoist and Chambon, Nature 29:304-310 (1981), the promoter contained in the 3′ long terminal repeat of Rous sarcoma virus (Yamamoto et al., Cell 22:787-797 (1980), the herpes thymidine promoter (Wagner et al., Proc. Natl. Acad. Sci. U.S.A. 78:1441-1445 (1981), the regulatory sequences of the metallothionein gene (Brinster, et al., Nature 296:39-42 (1982)), etc.

[0732] The antisense nucleic acids of the invention comprise a sequence complementary to at least a portion of an RNA transcript of a gene of the present invention. However, absolute complementarity, although preferred, is not required. A sequence “complementary to at least a portion of an RNA,” referred to herein, means a sequence having sufficient complementarity to be able to hybridize with the RNA, forming a stable duplex; in the case of double stranded antisense nucleic acids, a single strand of the duplex DNA may thus be tested, or triplex formation may be assayed. The ability to hybridize will depend on both the degree of complementarity and the length of the antisense nucleic acid. Generally, the larger the hybridizing nucleic acid, the more base mismatches with a RNA it may contain and still form a stable duplex (or triplex as the case may be). One skilled in the art can ascertain a tolerable degree of mismatch by use of standard procedures to determine the melting point of the hybridized complex.

[0733] Oligonucleotides that are complementary to the 5′ end of the message, e.g., the 5′ untranslated sequence up to and including the AUG initiation codon, should work most efficiently at inhibiting translation. However, sequences complementary to the 3′ untranslated sequences of mRNAs have been shown to be effective at inhibiting translation of mRNAs as well. See generally, Wagner, R., 1994, Nature 372:333-335. Thus, oligonucleotides complementary to either the 5′- or 3′- non- translated, non-coding regions of polynucleotide sequences described herein could be used in an antisense approach to inhibit translation of endogenous mRNA. Oligonucleotides complementary to the 5′ untranslated region of the mRNA should include the complement of the AUG start codon. Antisense oligonucleotides complementary to mRNA coding regions are less efficient inhibitors of translation but could be used in accordance with the invention. Whether designed to hybridize to the 5′-, 3′- or coding region of mRNA of the present invention, antisense nucleic acids should be at least six nucleotides in length, and are preferably oligonucleotides ranging from 6 to about 50 nucleotides in length. In specific aspects the oligonucleotide is at least 10 nucleotides, at least 17 nucleotides, at least 25 nucleotides or at least 50 nucleotides.

[0734] The polynucleotides of the invention can be DNA or RNA or chimeric mixtures or derivatives or modified versions thereof, single-stranded or double-stranded. The oligonucleotide can be modified at the base moiety, sugar moiety, or phosphate backbone, for example, to improve stability of the molecule, hybridization, etc. The oligonucleotide may include other appended groups such as peptides (e.g., for targeting host cell receptors in vivo), or agents facilitating transport across the cell membrane (see, e.g., Letsinger et al., 1989, Proc. Natl. Acad. Sci. U.S.A. 86:6553-6556; Lemaitre et al., 1987, Proc. Natl. Acad. Sci. 84:648-652; PCT Publication No. W088/09810, published December 15, 1988) or the blood-brain barrier (see, e.g., PCT Publication No. WO89/10134, published April 25, 1988), hybridization-triggered cleavage agents. (See, e.g., Krol et al., 1988, BioTechniques 6:958-976) or intercalating agents. (See, e.g., Zon, 1988, Pharm. Res. 5:539-549). To this end, the oligonucleotide may be conjugated to another molecule, e.g., a peptide, hybridization triggered cross-linking agent, transport agent, hybridization-triggered cleavage agent, etc.

[0735] The antisense oligonucleotide may comprise at least one modified base moiety which is selected from the group including, but not limited to, 5-fluorouracil, 5-bromouracil, 5-chlorouracil, 5-iodouracil, hypoxanthine, xantine, 4-acetylcytosine, 5-(carboxyhydroxylmethyl) uracil, 5-carboxymethylaminomethyl-2-thiouridine, 5-carboxymethylaminomethyluracil, dihydrouracil, beta-D-galactosylqueosine, inosine, N6-isopentenyladenine, 1-methylguanine, 1-methylinosine, 2,2-dimethylguanine, 2-methyladenine, 2-methylguanine, 3-methylcytosine, 5-methylcytosine, N6-adenine, 7-methylguanine, 5-methylaminomethyluracil, 5-methoxyaminomethyl-2-thiouracil, beta-D-mannosylqueosine, 5′-methoxycarboxymethyluracil, 5-methoxyuracil, 2-methylthio-N6-isopentenyladenine, uracil-5-oxyacetic acid (v), wybutoxosine, pseudouracil, queosine, 2-thiocytosine, 5-methyl-2-thiouracil, 2-thiouracil, 4-thiouracil, 5-methyluracil, uracil-5-oxyacetic acid methylester, uracil-5-oxyacetic acid (v), 5-methyl-2-thiouracil, 3-(3-amino-3-N-2-carboxypropyl) uracil, (acp3)w, and 2,6-diaminopurine.

[0736] The antisense oligonucleotide may also comprise at least one modified sugar moiety selected from the group including, but not limited to, arabinose, 2-fluoroarabinose, xylulose, and hexose.

[0737] In yet another embodiment, the antisense oligonucleotide comprises at least one modified phosphate backbone selected from the group including, but not limited to, a phosphorothioate, a phosphorodithioate, a phosphoramidothioate, a phosphoramidate, a phosphordiamidate, a methylphosphonate, an alkyl phosphotriester, and a formacetal or analog thereof.

[0738] In yet another embodiment, the antisense oligonucleotide is an a-anomeric oligonucleotide. An a-anomeric oligonucleotide forms specific double-stranded hybrids with complementary RNA in which, contrary to the usual b-units, the strands run parallel to each other (Gautier et al., 1987, Nucl. Acids Res. 15:6625-6641). The oligonucleotide is a 2′-O-methylribonucleotide (Inoue et al., 1987, Nucl. Acids Res. 15:6131-6148), or a chimeric RNA-DNA analogue (Inoue et al., 1987, FEBS Lett. 215:327-330).

[0739] Polynucleotides of the invention may be synthesized by standard methods known in the art, e.g. by use of an automated DNA synthesizer (such as are commercially available from Biosearch, Applied Biosystems, etc.). As examples, phosphorothioate oligonucleotides may be synthesized by the method of Stein et al. (1988, Nucl. Acids Res. 16:3209), methylphosphonate oligonucleotides can be prepared by use of controlled pore glass polymer supports (Sarin et al., 1988, Proc. Natl. Acad. Sci. U.S.A. 85:7448-7451), etc.

[0740] While antisense nucleotides complementary to the coding region sequence could be used, those complementary to the transcribed untranslated region are most preferred.

[0741] Potential antagonists according to the invention also include catalytic RNA, or a ribozyme (See, e.g., PCT International Publication WO 90/11364, published Oct. 4, 1990; Sarver et al, Science 247:1222-1225 (1990). While ribozymes that cleave mRNA at site specific recognition sequences can be used to destroy mRNAs, the use of hammerhead ribozymes is preferred. Hammerhead ribozymes cleave niRNAs at locations dictated by flanking regions that form complementary base pairs with the target mRNA. The sole requirement is that the target mRNA have the following sequence of two bases: 5′-UG-3′. The construction and production of hammerhead ribozymes is well known in the art and is described more fully in Haseloff and Gerlach, Nature 334:585-591 (1988). There are numerous potential hammerhead ribozyme cleavage sites within the nucleotide sequence of SEQ ID NO:X. Preferably, the ribozyme is engineered so that the cleavage recognition site is located near the 5′ end of the mRNA; i.e., to increase efficiency and minimize the intracellular accumulation of non-functional mRNA transcripts.

[0742] As in the antisense approach, the ribozymes of the invention can be composed of modified oligonucleotides (e.g. for improved stability, targeting, etc.) and should be delivered to cells which express in vivo. DNA constructs encoding the ribozyme may be introduced into the cell in the same manner as described above for the introduction of antisense encoding DNA. A preferred method of delivery involves using a DNA construct “encoding” the ribozyme under the control of a strong constitutive promoter, such as, for example, pol II or pol II promoter, so that transfected cells will produce sufficient quantities of the ribozyme to destroy endogenous messages and inhibit translation. Since ribozymes unlike antisense molecules, are catalytic, a lower intracellular concentration is required for efficiency.

[0743] Antagonist/agonist compounds may be employed to inhibit the cell growth and proliferation effects of the polypeptides of the present invention on neoplastic cells and tissues, i.e. stimulation of angiogenesis of tumors, and, therefore, retard or prevent abnormal cellular growth and proliferation, for example, in tumor formation or growth.

[0744] The antagonist/agonist may also be employed to prevent hyper-vascular diseases, and prevent the proliferation of epithelial lens cells after extracapsular cataract surgery. Prevention of the mitogenic activity of the polypeptides of the present invention may also be desirous in cases such as restenosis after balloon angioplasty.

[0745] The antagonist/agonist may also be employed to prevent the growth of scar tissue during wound healing.

[0746] The antagonist/agonist may also be employed to treat the diseases described herein.

[0747] Thus, the invention provides a method of treating disorders or diseases, including but not limited to the disorders or diseases listed throughout this application, associated with overexpression of a polynucleotide of the present invention by administering to a patient (a) an antisense molecule directed to the polynucleotide of the present invention, and/or (b) a ribozyme directed to the polynucleotide of the present invention.

[0748] Binding Peptides and Other Molecules

[0749] The invention also encompasses screening methods for identifying polypeptides and nonpolypeptides that bind colorectal cancer antigen polypeptides, and the colorectal cancer antigen binding molecules identified thereby. These binding molecules are useful, for example, as agonists and antagonists of the colorectal cancer antigen polypeptides. Such agonists and antagonists can be used, in accordance with the invention, in the therapeutic embodiments described in detail, below.

[0750] This method comprises the steps of:

[0751] (a) contacting colorectal cancer antigen polypeptides or colorectal cancer antigen-like polypeptides with a plurality of molecules; and

[0752] (b) identifying a molecule that binds the colorectal cancer antigen polypeptides or colorectal cancer antigen-like polypeptides.

[0753] The step of contacting the colorectal cancer antigen polypeptides or colorectal cancer antigen-like polypeptides with the plurality of molecules may be effected in a number of ways. For example, one may contemplate immobilizing the colorectal cancer antigen polypeptides or colorectal cancer antigen-like polypeptides on a solid support and bringing a solution of the plurality of molecules in contact with the immobilized colorectal cancer antigen polypeptides or colorectal cancer antigen-like polypeptides. Such a procedure would be akin to an affinity chromatographic process, with the affinity matrix being comprised of the immobilized colorectal cancer antigen polypeptides or colorectal cancer antigen-like polypeptides. The molecules having a selective affinity for the colorectal cancer antigen polypeptides or colorectal cancer antigen-like polypeptides can then be purified by affinity selection. The nature of the solid support, process for attachment of the colorectal cancer antigen polypeptides or colorectal cancer antigen-like polypeptides to the solid support, solvent, and conditions of the affinity isolation or selection are largely conventional and well known to those of ordinary skill in the art.

[0754] Alternatively, one may also separate a plurality of polypeptides into substantially separate fractions comprising a subset of or individual polypeptides. For instance, one can separate the plurality of polypeptides by gel electrophoresis, column chromatography, or like method known to those of ordinary skill for the separation of polypeptides. The individual polypeptides can also be produced by a transformed host cell in such a way as to be expressed on or about its outer surface (e.g., a recombinant phage). Individual isolates can then be “probed” by the colorectal cancer antigen polypeptides or colorectal cancer antigen-like polypeptides, optionally in the presence of an inducer should one be required for expression, to determine if any selective affinity interaction takes place between the colorectal cancer antigen polypeptides or colorectal cancer antigen-like polypeptides and the individual clone. Prior to contacting the colorectal cancer antigen polypeptides or colorectal cancer antigen-like polypeptides with each fraction comprising individual polypeptides, the polypeptides could first be transferred to a solid support for additional convenience. Such a solid support may simply be a piece of filter membrane, such as one made of nitrocellulose or nylon. In this manner, positive clones could be identified from a collection of transformed host cells of an expression library, which harbor a DNA construct encoding a polypeptide having a selective affinity for colorectal cancer antigen polypeptides or colorectal cancer antigen-like polypeptides. Furthermore, the amino acid sequence of the polypeptide having a selective affinity for the colorectal cancer antigen polypeptides or colorectal cancer antigen-like polypeptides can be determined directly by conventional means or the coding sequence of the DNA encoding the polypeptide can frequently be determined more conveniently. The primary sequence can then be deduced from the corresponding DNA sequence. If the amino acid sequence is to be determined from the polypeptide itself, one may use microsequencing techniques. The sequencing technique may include mass spectroscopy.

[0755] In certain situations, it may be desirable to wash away any unbound colorectal cancer antigen polypeptides or colorectal cancer antigen-like polypeptides, or alternatively, unbound polypeptides, from a mixture of the colorectal cancer antigen polypeptides or colorectal cancer antigen-like polypeptides and the plurality of polypeptides prior to attempting to determine or to detect the presence of a selective affinity interaction. Such a wash step may be particularly desirable when the colorectal cancer antigen polypeptides or colorectal cancer antigen-like polypeptides or the plurality of polypeptides is bound to a solid support.

[0756] The plurality of molecules provided according to this method may be provided by way of diversity libraries, such as random or combinatorial peptide or nonpeptide libraries which can be screened for molecules that specifically bind colorectal cancer antigen polypeptides. Many libraries are known in the art that can be used, e.g., chemically synthesized libraries, recombinant (e.g., phage display libraries), and in vitro translation-based libraries. Examples of chemically synthesized libraries are described in Fodor et al., 1991, Science 251:767-773; Houghten et al., 1991, Nature 354:84-86; Lam et al., 1991, Nature 354:82-84; Medynski, 1994, Bio/Technology 12:709-710;Gallop et al., 1994, J. Medicinal Chemistry 37(9):1233-1251; Ohlmeyer et al., 1993, Proc. Natl. Acad. Sci. USA 90:10922-10926; Erb et al., 1994, Proc. Natl. Acad. Sci. USA 91:11422-11426; Houghten et al., 1992, Biotechniques 13:412; Jayawickreme et al., 1994, Proc. Natl. Acad. Sci. USA 91:1614-1618; Salmon et al., 1993, Proc. Natl. Acad. Sci. USA 90:11708-11712; PCT Publication No. WO 93/20242; and Brenner and Lemer, 1992, Proc. Natl. Acad. Sci. USA 89:5381-5383.

[0757] Examples of phage display libraries are described in Scott and Smith, 1990, Science 249:386-390; Devlin et al., 1990, Science, 249:404-406; Christian, R. B., et al., 1992, J. Mol. Biol. 227:711-718); Lenstra, 1992, J. Immunol. Meth. 152:149-157; Kay et al., 1993, Gene 128:59-65; and PCT Publication No. WO 94/18318 dated Aug. 18, 1994.

[0758] In vitro translation-based libraries include but are not limited to those described in PCT Publication No. WO 91/05058 dated Apr. 18, 1991; and Mattheakis et al., 1994, Proc. Natl. Acad. Sci. USA 91:9022-9026.

[0759] By way of examples of nonpeptide libraries, a benzodiazepine library (see e.g., Bunin et al., 1994, Proc. Natl. Acad. Sci. USA 91:4708-4712) can be adapted for use. Peptoid libraries (Simon et al., 1992, Proc. Natl. Acad. Sci. USA 89:9367-9371) can also be used. Another example of a library that can be used, in which the amide functionalities in peptides have been permethylated to generate a chemically transformed combinatorial library, is described by Ostresh et al. (1994, Proc. Natl. Acad. Sci. USA 91:11138-11142).

[0760] The variety of non-peptide libraries that are useful in the present invention is great. For example, Ecker and Crooke, 1995, Bio/Technology 13:351-360 list benzodiazepines, hydantoins, piperazinediones, biphenyls, sugar analogs, beta-mercaptoketones, arylacetic acids, acylpiperidines, benzopyrans, cubanes, xanthines, aminimides, and oxazolones as among the chemical species that form the basis of various libraries.

[0761] Non-peptide libraries can be classified broadly into two types: decorated monomers and oligomers. Decorated monomer libraries employ a relatively simple scaffold structure upon which a variety functional groups is added. Often the scaffold will be a molecule with a known useful pharmacological activity. For example, the scaffold might be the benzodiazepine structure.

[0762] Non-peptide oligomer libraries utilize a large number of monomers that are assembled together in ways that create new shapes that depend on the order of the monomers. Among the monomer units that have been used are carbamates, pyrrolinones, and morpholinos. Peptoids, peptide-like oligomers in which the side chain is attached to the alpha amino group rather than the alpha carbon, form the basis of another version of non-peptide oligomer libraries. The first non-peptide oligomer libraries utilized a single type of monomer and thus contained a repeating backbone. Recent libraries have utilized more than one monomer, giving the libraries added flexibility.

[0763] Screening the libraries can be accomplished by any of a variety of commonly known methods. See, e.g., the following references, which disclose screening of peptide libraries: Parmley and Smith, 1989, Adv. Exp. Med. Biol. 251:215-218; Scott and Smith, 1990, Science 249:386-390; Fowlkes et al., 1992; BioTechniques 13:422-427; Oldenburg et al., 1992, Proc. Natl. Acad. Sci. USA 89:5393-5397; Yu et al., 1994, Cell 76:933-945; Staudt et al., 1988, Science 241:577-580; Bock et al., 1992, Nature 355:564-566; Tuerk et al., 1992, Proc. Natl. Acad. Sci. USA 89:6988-6992; Ellington et al., 1992, Nature 355:850-852; U.S. Pat. No. 5,096,815, U.S. Pat. No. 5,223,409, and U.S. Pat. No. 5,198,346, all to Ladner et al.; Rebar and Pabo, 1993, Science 263:671-673; and CT Publication No. WO 94/18318.

[0764] In a specific embodiment, screening to identify a molecule that binds colorectal cancer antigen polypeptides can be carried out by contacting the library members with a colorectal cancer antigen polypeptides or colorectal cancer antigen-like polypeptides immobilized on a solid phase and harvesting those library members that bind to the colorectal cancer antigen polypeptides or colorectal cancer antigen-like polypeptides. Examples of such screening methods, termed “panning” techniques are described by way of example in Parmley and Smith, 1988, Gene 73:305-318; Fowlkes et al., 1992, BioTechniques 13:422-427; International Publication No. WO 94/18318; and in references cited herein.

[0765] In another embodiment, the two-hybrid system for selecting interacting proteins in yeast (Fields and Song, 1989, Nature 340:245-246; Chien et al., 1991, Proc. Natl. Acad. Sci. USA 88:9578-9582) can be used to identify molecules that specifically bind to colorectal cancer antigen polypeptides or colorectal cancer antigen-like polypeptides.

[0766] Where the colorectal cancer antigen binding molecule is a polypeptide, the polypeptide can be conveniently selected from any peptide library, including random peptide libraries, combinatorial peptide libraries, or biased peptide libraries. The term “biased” is used herein to mean that the method of generating the library is manipulated so as to restrict one or more parameters that govern the diversity of the resulting collection of molecules, in this case peptides.

[0767] Thus, a truly random peptide library would generate a collection of peptides in which the probability of finding a particular amino acid at a given position of the peptide is the same for all 20 amino acids. A bias can be introduced into the library, however, by specifying, for example, that a lysine occurs every fifth amino acid or that positions 4, 8, and 9 of a decapeptide library be fixed to include only arginine. Clearly, many types of biases can be contemplated, and the present invention is not restricted to any particular bias. Furthermore, the present invention contemplates specific types of peptide libraries, such as phage displayed peptide libraries and those that utilize a DNA construct comprising a lambda phage vector with a DNA insert.

[0768] As mentioned above, in the case of a colorectal cancer antigen binding molecule that is a polypeptide, the polypeptide may have about 6 to less than about 60 amino acid residues, preferably about 6 to about 10 amino acid residues, and most preferably, about 6 to about 22 amino acids. In another embodiment, a colorectal cancer antigen binding polypeptide has in the range of 15-100 amino acids, or 20-50 amino acids.

[0769] The selected colorectal cancer antigen binding polypeptide can be obtained by chemical synthesis or recombinant expression.

[0770] Other Activities

[0771] A polypeptide, polynucleotide, agonist, or antagonist of the present invention, as a result of the ability to stimulate vascular endothelial cell growth, may be employed in treatment for stimulating re-vascularization of ischemic tissues due to various disease conditions such as thrombosis, arteriosclerosis, and other cardiovascular conditions. The polypeptide, polynucleotide, agonist, or antagonist of the present invention may also be employed to stimulate angiogenesis and limb regeneration, as discussed above.

[0772] A polypeptide, polynucleotide, agonist, or antagonist of the present invention may also be employed for treating wounds due to injuries, bums, post-operative tissue repair, and ulcers since they are mitogenic to various cells of different origins, such as fibroblast cells and skeletal muscle cells, and therefore, facilitate the repair or replacement of damaged or diseased tissue.

[0773] A polypeptide, polynucleotide, agonist, or antagonist of the present invention may also be employed stimulate neuronal growth and to treat and prevent neuronal damage which occurs in certain neuronal disorders or neuro-degenerative conditions such as Alzheimer's disease, Parkinson's disease, and AIDS-related complex. A polypeptide, polynucleotide, agonist, or antagonist of the present invention may have the ability to stimulate chondrocyte growth, therefore, they may be employed to enhance bone and periodontal regeneration and aid in tissue transplants or bone grafts.

[0774] A polypeptide, polynucleotide, agonist, or antagonist of the present invention may be also be employed to prevent skin aging due to sunburn by stimulating keratinocyte growth.

[0775] A polypeptide, polynucleotide, agonist, or antagonist of the present invention may also be employed for preventing hair loss, since FGF family members activate hair-forming cells and promotes melanocyte growth. Along the same lines, a polypeptide, polynucleotide, agonist, or antagonist of the present invention may be employed to stimulate growth and differentiation of hematopoietic cells and bone marrow cells when used in combination with other cytokines.

[0776] A polypeptide, polynucleotide, agonist, or antagonist of the present invention may also be employed to maintain organs before transplantation or for supporting cell culture of primary tissues. A polypeptide, polynucleotide, agonist, or antagonist of the present invention may also be employed for inducing tissue of mesodermal origin to differentiate in early embryos.

[0777] A polypeptide, polynucleotide, agonist, or antagonist of the present invention may also increase or decrease the differentiation or proliferation of embryonic stem cells, besides, as discussed above, hematopoietic lineage.

[0778] A polypeptide, polynucleotide, agonist, or antagonist of the present invention may also be used to modulate mammalian characteristics, such as body height, weight, hair color, eye color, skin, percentage of adipose tissue, pigmentation, size, and shape (e.g., cosmetic surgery). Similarly, a polypeptide, polynucleotide, agonist, or antagonist of the present invention may be used to modulate mammalian metabolism affecting catabolism, anabolism, processing, utilization, and storage of energy.

[0779] A polypeptide, polynucleotide, agonist, or antagonist of the present invention may be used to change a mammal's mental state or physical state by influencing biorhythms, caricadic rhythms, depression (including depressive disorders), tendency for violence, tolerance for pain, reproductive capabilities (preferably by Activin or Inhibin-like activity), hormonal or endocrine levels, appetite, libido, memory, stress, or other cognitive qualities.

[0780] A polypeptide, polynucleotide, agonist, or antagonist of the present invention may also be used as a food additive or preservative, such as to increase or decrease storage capabilities, fat content, lipid, protein, carbohydrate, vitamins, minerals, cofactors or other nutritional components.

[0781] The above-recited applications have uses in a wide variety of hosts. Such hosts include, but are not limited to, human, murine, rabbit, goat, guinea pig, camel, horse, mouse, rat, hamster, pig, micro-pig, chicken, goat, cow, sheep, dog, cat, non-human primate, and human. In specific embodiments, the host is a mouse, rabbit, goat, guinea pig, chicken, rat, hamster, pig, sheep, dog or cat. In preferred embodiments, the host is a mammal. In most preferred embodiments, the host is a human.

[0782] Other Preferred Embodiments

[0783] Other preferred embodiments of the claimed invention include an isolated nucleic acid molecule comprising a nucleotide sequence which is at least 95% identical to a sequence of at least about 50 contiguous nucleotides in the nucleotide sequence of SEQ ID NO:X or the complementary strand thereto, and/or the cDNA in the related cDNA clone contained in the deposit.

[0784] Also preferred is a nucleic acid molecule wherein said sequence of contiguous nucleotides is included in the nucleotide sequence of SEQ ID NO:X in the range of positions identified as “Start” and “End” in columns 7 and 8 as defined for SEQ ID NO:X in Table 1.

[0785] Also preferred is an isolated nucleic acid molecule comprising a nucleotide sequence which is at least 95% identical to a sequence of at least about 150 contiguous nucleotides in the nucleotide sequence of SEQ ID NO:X or the complementary strand thereto, and/or the cDNA in the related cDNA clone contained in the deposit.

[0786] Further preferred is an isolated nucleic acid molecule comprising a nucleotide sequence which is at least 95% identical to a sequence of at least about 500 contiguous nucleotides in the nucleotide sequence of SEQ ID NO:X or the complementary strand thereto, and/or the cDNA in the related cDNA clone contained in the deposit.

[0787] A further preferred embodiment is a nucleic acid molecule comprising a nucleotide sequence which is at least 95% identical to the nucleotide sequence of SEQ ID NO:X in the range of positions identified as “Start” and “End” in columns 7 and 8 as defined for SEQ ID NO:X in Table 1.

[0788] A further preferred embodiment is an isolated nucleic acid molecule comprising a nucleotide sequence which is at least 95% identical to the complete nucleotide sequence of SEQ ID NO:X or the complementary strand thereto, and/or the cDNA in the related cDNA clone contained in the deposit.

[0789] Also preferred is an isolated nucleic acid molecule which hybridizes under stringent hybridization conditions to a nucleic acid molecule comprising a nucleotide sequence of SEQ ID NO:X or the complementary strand thereto, and/or the cDNA in the related cDNA clone contained in the deposit, wherein said nucleic acid molecule which hybridizes does not hybridize under stringent hybridization conditions to a nucleic acid molecule having a nucleotide sequence consisting of only A residues or of only T residues.

[0790] Also preferred is a composition of matter comprising a DNA molecule which comprises a cDNA clone contained in the deposit.

[0791] Also preferred is an isolated nucleic acid molecule comprising a nucleotide sequence which is at least 95% identical to a sequence of at least 50 contiguous nucleotides in the nucleotide sequence of the cDNA in the related cDNA clone contained in the deposit.

[0792] Also preferred is an isolated nucleic acid molecule, wherein said sequence of at least 50 contiguous nucleotides is included in the nucleotide sequence of an open reading frame sequence encoded by the cDNA in the related cDNA clone contained in the deposit.

[0793] Also preferred is an isolated nucleic acid molecule comprising a nucleotide sequence which is at least 95% identical to sequence of at least 150 contiguous nucleotides in the nucleotide sequence encoded by the cDNA in the related cDNA clone contained in the deposit.

[0794] A further preferred embodiment is an isolated nucleic acid molecule comprising a nucleotide sequence which is at least 95% identical to sequence of at least 500 contiguous nucleotides in the nucleotide sequence encoded by the cDNA in the related cDNA clone contained in the deposit.

[0795] A further preferred embodiment is an isolated nucleic acid molecule comprising a nucleotide sequence which is at least 95% identical to the complete nucleotide sequence encoded by the cDNA in the related cDNA clone contained in the deposit.

[0796] A further preferred embodiment is a method for detecting in a biological sample a nucleic acid molecule comprising a nucleotide sequence which is at least 95% identical to a sequence of at least 50 contiguous nucleotides in a sequence selected from the group consisting of: a nucleotide sequence of SEQ ID NO:X or the complementary strand thereto; and a nucleotide sequence encoded by the cDNA in the related cDNA clone contained in the deposit; which method comprises a step of comparing a nucleotide sequence of at least one nucleic acid molecule in said sample with a sequence selected from said group and determining whether the sequence of said nucleic acid molecule in said sample is at least 95% identical to said selected sequence.

[0797] Also preferred is the above method wherein said step of comparing sequences comprises determining the extent of nucleic acid hybridization between nucleic acid molecules in said sample and a nucleic acid molecule comprising said sequence selected from said group. Similarly, also preferred is the above method wherein said step of comparing sequences is performed by comparing the nucleotide sequence determined from a nucleic acid molecule in said sample with said sequence selected from said group. The nucleic acid molecules can comprise DNA molecules or RNA molecules.

[0798] A further preferred embodiment is a method for identifying the species, tissue or cell type of a biological sample which method comprises a step of detecting nucleic acid molecules in said sample, if any, comprising a nucleotide sequence that is at least 95% identical to a sequence of at least 50 contiguous nucleotides in a sequence selected from the group consisting of: a nucleotide sequence of SEQ ID NO:X or the complementary strand thereto; and a nucleotide sequence encoded by the cDNA in the related cDNA clone contained in the deposit.

[0799] Also preferred is the above method for identifying the species, tissue or cell type of a biological sample which comprises a step of detecting nucleic acid molecules comprising a nucleotide sequence in a panel of at least two nucleotide sequences, wherein at least one sequence in said panel is at least 95% identical to a sequence of at least 50 contiguous nucleotides in a sequence selected from said group.

[0800] Also preferred is a method for diagnosing in a subject a pathological condition associated with abnormal structure or expression of a nucleotide sequence of SEQ ID NO:X; or the cDNA contained in the related cDNA clone referenced in Table 1 which encodes a protein, wherein the method comprises a step of detecting in a biological sample obtained from said subject nucleic acid molecules, if any, comprising a nucleotide sequence that is at least 95% identical to a sequence of at least 50 contiguous nucleotides in a sequence selected from the group consisting of: a nucleotide sequence of SEQ ID NO:X or the complementary strand thereto; and a nucleotide sequence of the cDNA in the related CDNA clone contained in the deposit.

[0801] Also preferred is the above method for diagnosing a pathological condition which comprises a step of detecting nucleic acid molecules comprising a nucleotide sequence in a panel of at least two nucleotide sequences, wherein at least one sequence in said panel is at least 95% identical to a sequence of at least 50 contiguous nucleotides in a sequence selected from said group.

[0802] Also preferred is a composition of matter comprising isolated nucleic acid molecules wherein the nucleotide sequences of said nucleic acid molecules comprise a panel of at least two nucleotide sequences, wherein at least one sequence in said panel is at least 95% identical to a sequence of at least 50 contiguous nucleotides in a sequence selected from the group consisting of: a nucleotide sequence of SEQ ID NO:X or the complementary strand thereto; and a nucleotide sequence encoded by the cDNA in the related cDNA clone contained in the deposit. The nucleic acid molecules can comprise DNA molecules or RNA molecules.

[0803] Also preferred is a composition of matter comprising isolated nucleic acid molecules wherein the nucleotide sequences of said nucleic acid molecules comprise a DNA microarray or “chip” of at least 1, 2, 3, 4, 5, 6, 7, 8, 9, 10, 15, 20, 25, 30, 40, 50, 100, 150, 200, 250, 300, 500, 1000, 2000, 3000 or 4000 nucleotide sequences, wherein at least one sequence in said DNA microarray or “chip” is at least 95% identical to a sequence of at least 50 contiguous nucleotides in a sequence selected from the group consisting of: a nucleotide sequence of SEQ ID NO:X or the complementary strand thereto; and a nucleotide sequence encoded by the cDNA in the cDNA clone referenced in Table 1. The nucleic acid molecules can comprise DNA molecules or RNA molecules.

[0804] Also preferred is an isolated polypeptide comprising an amino acid sequence at least 90% identical to a sequence of at least about 10 contiguous amino acids in the polypeptide sequence of SEQ ID NO:Y; a polypeptide encoded by SEQ ID NO:X; and/or a polypeptide encoded by the cDNA in the related cDNA clone contained in the deposit.

[0805] Also preferred is an isolated polypeptide comprising an amino acid sequence at least 95% identical to a sequence of at least about 30 contiguous amino acids in the amino acid sequence of SEQ ID NO:Y; a polypeptide encoded by SEQ ID NO:X; and/or a polypeptide encoded by the cDNA in the related cDNA clone contained in the deposit.

[0806] Further preferred is an isolated polypeptide comprising an amino acid sequence at least 95% identical to a sequence of at least about 100 contiguous amino acids in the amino acid sequence of SEQ ID NO:Y; a polypeptide encoded by SEQ ID NO:X; and/or a polypeptide encoded by the cDNA in the related cDNA clone contained in the deposit.

[0807] Further preferred is an isolated polypeptide comprising an amino acid sequence at least 95% identical to the complete amino acid sequence of SEQ ID NO:Y; a polypeptide encoded by SEQ ID NO:X; and/or a polypeptide encoded by the cDNA in the related cDNA clone contained in the deposit.

[0808] Further preferred is an isolated polypeptide comprising an amino acid sequence at least 90% identical to a sequence of at least about 10 contiguous amino acids in the complete amino acid sequence of a polypeptide encoded by the cDNA clone referenced in Table 1.

[0809] Also preferred is a polypeptide wherein said sequence of contiguous amino acids is included in the amino acid sequence of a portion of said polypeptide encoded by the cDNA clone referenced in Table 1; a polypeptide encoded by SEQ ID NO:X; and/or the polypeptide sequence of SEQ ID NO:Y.

[0810] Also preferred is an isolated polypeptide comprising an amino acid sequence at least 95% identical to a sequence of at least about 30 contiguous amino acids in the amino acid sequence of a polypeptide encoded by the cDNA clone referenced in Table 1.

[0811] Also preferred is an isolated polypeptide comprising an amino acid sequence at least 95% identical to a sequence of at least about 100 contiguous amino acids in the amino acid sequence of a polypeptide encoded by the cDNA clone referenced in Table 1.

[0812] Also preferred is an isolated polypeptide comprising an amino acid sequence at least 95% identical to the amino acid sequence of a polypeptide encoded by the cDNA clone referenced in Table 1.

[0813] Further preferred is an isolated antibody which binds specifically to a polypeptide comprising an amino acid sequence that is at least 90% identical to a sequence of at least 10 contiguous amino acids in a sequence selected from the group consisting of: a polypeptide sequence of SEQ ID NO:Y; a polypeptide encoded by SEQ ID NO:X; and a polypeptide encoded by the cDNA in the related cDNA clone contained in the deposit.

[0814] Further preferred is a method for detecting in a biological sample a polypeptide comprising an amino acid sequence which is at least 90% identical to a sequence of at least 10 contiguous amino acids in a sequence selected from the group consisting of: a polypeptide sequence of SEQ ID NO:Y; a polypeptide encoded by SEQ ID NO:X; and a polypeptide encoded by the cDNA in the related cDNA clone referenced in Table 1; which method comprises a step of comparing an amino acid sequence of at least one polypeptide molecule in said sample with a sequence selected from said group and determining whether the sequence of said polypeptide molecule in said sample is at least 90% identical to said sequence of at least 10 contiguous amino acids.

[0815] Also preferred is the above method wherein said step of comparing an amino acid sequence of at least one polypeptide molecule in said sample with a sequence selected from said group comprises determining the extent of specific binding of polypeptides in said sample to an antibody which binds specifically to a polypeptide comprising an amino acid sequence that is at least 90% identical to a sequence of at least 10 contiguous amino acids in a sequence selected from the group consisting of: a polypeptide sequence of SEQ ID NO:Y; a polypeptide encoded by SEQ ID NO:X; and a polypeptide encoded by the cDNA in the related cDNA clone referenced in Table 1.

[0816] Also preferred is the above method wherein said step of comparing sequences is performed by comparing the amino acid sequence determined from a polypeptide molecule in said sample with said sequence selected from said group.

[0817] Also preferred is a method for identifying the species, tissue or cell type of a biological sample which method comprises a step of detecting polypeptide molecules in said sample, if any, comprising an amino acid sequence that is at least 90% identical to a sequence of at least 10 contiguous amino acids in a sequence selected from the group consisting of: polypeptide sequence of SEQ ID NO:Y; a polypeptide encoded by SEQ ID NO:X; and a polypeptide encoded by the cDNA in the related cDNA clone referenced in Table 1.

[0818] Also preferred is the above method for identifying the species, tissue or cell type of a biological sample, which method comprises a step of detecting polypeptide molecules comprising an amino acid sequence in a panel of at least two amino acid sequences, wherein at least one sequence in said panel is at least 90% identical to a sequence of at least 10 contiguous amino acids in a sequence selected from the above group.

[0819] Also preferred is a method for diagnosing in a subject a pathological condition associated with abnormal structure or expression of a nucleic acid sequence identified in Table 1 encoding a polypeptide, which method comprises a step of detecting in a biological sample obtained from said subject polypeptide molecules comprising an amino acid sequence in a panel of at least two amino acid sequences, wherein at least one sequence in said panel is at least 90% identical to a sequence of at least 10 contiguous amino acids in a sequence selected from the group consisting of: polypeptide sequence of SEQ ID NO:Y; a polypeptide encoded by SEQ ID NO:X; and a polypeptide encoded by the cDNA in the related cDNA clone referenced in Table 1.

[0820] In any of these methods, the step of detecting said polypeptide molecules includes using an antibody.

[0821] Also preferred is an isolated nucleic acid molecule comprising a nucleotide sequence which is at least 95% identical to a nucleotide sequence encoding a polypeptide wherein said polypeptide comprises an amino acid sequence that is at least 90% identical to a sequence of at least 10 contiguous amino acids in a sequence selected from the group consisting of: polypeptide sequence of SEQ ID NO:Y; a polypeptide encoded by SEQ ID NO:X; and a polypeptide encoded by the cDNA in the related cDNA clone referenced in Table 1.

[0822] Also preferred is an isolated nucleic acid molecule, wherein said nucleotide sequence encoding a polypeptide has been optimized for expression of said polypeptide in a prokaryotic host.

[0823] Also preferred is an isolated nucleic acid molecule, wherein said polypeptide comprises an amino acid sequence selected from the group consisting of: polypeptide sequence of SEQ ID NO:Y; a polypeptide encoded by SEQ ID NO:X; and a polypeptide encoded by the cDNA in the related cDNA clone referenced in Table 1.

[0824] Further preferred is a method of making a recombinant vector comprising inserting any of the above isolated nucleic acid molecule into a vector. Also preferred is the recombinant vector produced by this method. Also preferred is a method of making a recombinant host cell comprising introducing the vector into a host cell, as well as the recombinant host cell produced by this method.

[0825] Also preferred is a method of making an isolated polypeptide comprising culturing this recombinant host cell under conditions such that said polypeptide is expressed and recovering said polypeptide. Also preferred is this method of making an isolated polypeptide, wherein said recombinant host cell is a eukaryotic cell and said polypeptide is a human protein comprising an amino acid sequence selected from the group consisting of: polypeptide sequence of SEQ ID NO:Y; a polypeptide encoded by SEQ ID NO:X; and a polypeptide encoded by the cDNA in the related cDNA clone referenced in Table 1. The isolated polypeptide produced by this method is also preferred.

[0826] Also preferred is a method of treatment of an individual in need of an increased level of a protein activity, which method comprises administering to such an individual a Therapeutic comprising an amount of an isolated polypeptide, polynucleotide, immunogenic fragment or analogue thereof, binding agent, antibody, or antigen binding fragment of the claimed invention effective to increase the level of said protein activity in said individual.

[0827] Also preferred is a method of treatment of an individual in need of a decreased level of a protein activity, which method comprised administering to such an individual a Therapeutic comprising an amount of an isolated polypeptide, polynucleotide, immunogenic fragment or analogue thereof, binding agent, antibody, or antigen binding fragment of the claimed invention effective to decrease the level of said protein activity in said individual.

[0828] Having generally described the invention, the same will be more readily understood by reference to the following examples, which are provided by way of illustration and are not intended as limiting.

### EXAMPLES

### Example 1

### Isolation of a Selected cDNA Clone From the Deposited Sample

[0829] Each deposited cDNA clone is contained in a plasmid vector. Table 5 identifies the vectors used to construct the cDNA library from which each clone was isolated. In many cases, the vector used to construct the library is a phage vector from which a plasmid has been excised. The following correlates the related plasmid for each phage vector used in constructing the cDNA library. For example, where a particular clone is identified in Table 5 as being isolated in the vector “Lambda Zap,” the corresponding deposited clone is in “pBluescript.”

| Vector Used to Construct Library | Corresponding Deposited Plasmid |
|---|---|
| Lambda Zap | pBluescript (pBS) |
| Uni-Zap XR | pBiuescript (pBS) |
| Zap Express | pBK |
| lafmid BA | plafmid BA |
| pSport1 | pSportl |
| pCMVSport 2.0 | pCMVSport 2.0 |
| pCMVSport 3.0 | pCMVSport 3.0 |
| pCR ® 2.1 | pCR ® 2.1 |

[0830] Vectors Lambda Zap (U.S. Pat. Nos. 5,128,256 and 5,286,636), Uni-Zap XR (U.S. Pat. Nos. 5,128, 256 and 5,286,636), Zap Express (U.S. Pat. Nos. 5,128,256 and 5,286,636), pBluescript (pBS) (Short, J. M. et al., Nucleic Acids Res. 16:7583-7600 (1988); Alting-Mees, M. A. and Short, J. M., Nucleic Acids Res. 17:9494 (1989)) and pBK (Alting-Mees, M. A. et al., Strategies 5:58-61 (1992)) are commercially available from Stratagene Cloning Systems, Inc., 11011 N. Torrey Pines Road, La Jolla, CA, 92037. pBS contains an ampicillin resistance gene and pBK contains a neomycin resistance gene. Both can be transformed into E. coli strain XL-1 Blue, also available from Stratagene. pBS comes in 4 forms SK+, SK−, KS+ and KS. The S and K refers to the orientation of the polylinker to the T7 and T3 primer sequences which flank the polylinker region (“S” is for SacI and “K” is for KpnI which are the first sites on each respective end of the linker). “+” or “−” refer to the orientation of the f1 origin of replication (“ori”), such that in one orientation, single stranded rescue initiated from the f1 ori generates sense strand DNA and in the other, antisense.

[0831] Vectors pSportl, pCMVSport 2.0 and pCMVSport 3.0, were obtained from Life Technologies, Inc., P. O. Box 6009, Gaithersburg, Md. 20897. All Sport vectors contain an ampicillin resistance gene and may be transformed into E. coli strain DH1OB, also available from Life Technologies. (See, for instance, Gruber, C. E., et al., Focus 15:59 (1993).) Vector lafmid BA (Bento Soares, Columbia University, NY) contains an ampicillin resistance gene and can be transformed into E. coli strain XL-1 Blue. Vector pCR®2.1, which is available from Invitrogen, 1600 Faraday Avenue, Carlsbad, Calif. 92008, contains an ampicillin resistance gene and may be transformed into E. coli strain DH1OB, available from Life Technologies. (See, for instance, Clark, J. M., Nuc. Acids Res. 16:9677-9686 (1988) and Mead, D. et al., Bio/Technology 9: (1991).) Preferably, a polynucleotide of the present invention does not comprise the phage vector sequences identified for the particular clone in Table 5, as well as the corresponding plasmid vector sequences designated above.

[0832] The deposited material in the sample assigned the ATCC Deposit Number cited by reference to Table 2 and 5 for any given cDNA clone also may contain one or more additional plasmids, each comprising a cDNA clone different from that given clone. Thus, deposits sharing the same ATCC Deposit Number contain at least a plasmid for each cDNA clone referenced in Table 1.

TABLE 5

| | | | ATCC |
|---|---|---|---|
| Libraries owned by Catalog | Catalog Description | Vector | Deposit |
| HUKA HUKB HUKC HUKD HUKE | Human Uterine Cancer | Lambda ZAP II | LP01 |
| HUKF HUKG | | | |
| HCNA HCNB | Human Colon | Lambda Zap II | LP01 |
| HFFA | Human Fetal Brain, random primed | Lambda Zap II | LP01 |
| HTWA | Resting T-Cell | Lambda ZAP II | LP01 |
| HBQA | Early Stage Human Brain, random | Lambda ZAP II | LP01 |
| HLMB HLMF HLMG HLMH HLMI | breast lymph node CDNA library | Lambda ZAP II | LP01 |
| HLMJ HLMM HLMN | | | |
| HCQA HCQB | human colon cancer | Lamda ZAP II | LP01 |
| HMEA HMEC HMED HMEE HMEF | Human Microvascular Endothelial Cells, | Lambda ZAP II | LP01 |
| HMEG HMEI HMEJ HMEK HMEL | fract. A | | |
| HUSA HUSC | Human Umbilical Vein Endothelial | Lambda ZAP II | LP01 |
| | Cells, fract. A | | |
| HLQA HLQB | Hepatocellular Tumor | Lambda ZAP II | LP01 |
| HHGA HHGB HHGC HHGD | Hemangiopericytoma | ambda ZAP II | |
| HSDM | Human Striatum Depression, re-rescue | Lambda ZAP II | LP01 |
| HUSH | H Umbilical Vein Endothelial Cells, frac | Lambda ZAP II | LP01 |
| | A re-excision | | |
| HSGS | Salivary gland, subtracted | Lambda ZAP II | LP01 |
| HFXA HFXB HFXC HFXD HFXE | Brain frontal cortex | Lambda ZAP II | LP01 |
| HFXF HFXG HFXH | | | |
| HPQA HPQB HPQC | PERM TF274 | Lambda ZAP II | LP01 |
| HFXJ HFXK | Brain Frontal Cortex, re-excision | Lambda ZAP II | LP01 |
| HCWA HCWB HCWC HCWD | CD34 positive cells (Cord Blood) | ZAP Express | LP02 |
| HCWE HCWF HCWG HCWH | | | |
| HCWI HCWJ HCWK | | | |
| HCUA HCUB HCUC | CD34 depleted Buffy Coat (Cord Blood) | ZAP Express | LP02 |
| HRSM | A-14 cell line | ZAP Express | LP02 |
| HRSA | A1-CELL LINE | ZAP Express | LP02 |
| HCUD HCUE HCUF HCUG HCUH | CD34 depleted Buffy Coat (Cord | ZAP Express | LP02 |
| HCUT | Blood), re-excision | | |
| HBXE HBXF HBXG | H. Whole Brain #2, re-excision | ZAP Express | LP02 |
| HRLM | L8 cell line | ZAP Express | LP02 |
| HBXA HBXB HBXC HBXD | Human Whole Brain #2 - Oligo dT> | ZAP Express | LP02 |
| | 1.5Kb | | |
| HUDA HUDB HUDC | Testes | ZAP Express | LP02 |
| HHTM HHTN HHTO | H. hypothalamus, frac A; re-excision | ZAP Express | LP02 |
| HHTL | H. hypothalamus, frac A | ZAP Express | LP02 |
| HASA HASD | Human Adult Spleen | Uni-ZAP XR | LP03 |
| HFKC HFKD HEKE HFKF HFKG | Human Fetal Kidney | Uni-ZAP XR | LP03 |
| HE8A HESB HESC HESD HE8E | Human 8 Week Whole Embryo | Uni-ZAP XR | LP03 |
| HE8F HE8M HE8N | | | |
| HGBA HGBD HGBE HGBF HGBG | Human Gall Bladder | Uni-ZAP XR | LP03 |
| HGBH HGBI | | | |
| HLHA HLHB HLHC HLHD HLHE | Human Fetal Lung III | Uni-ZAP XR | LP03 |
| HLHF HLHG HLHH HLHQ | | | |
| HPMA HPMB HPMC HPMD HPME | Human Placenta | Uni-ZAP XR | LP03 |
| HPMF HPMG HPMH | | | |
| HPRA HPRB HPRC HPRD | Human Prostate | Uni-ZAP XR | LP03 |
| HSIA HSIC HSID HSIE | Human Adult Small Intestine | Uni-ZAP XR | LP03 |
| HTEA HTEB HTEC HTED HTEE | Human Testes | Uni-ZAP XR | LP03 |
| HTEF HTEG HTEH HTEI HTEJ | | | |
| HTEK | | | |
| HTPA HTPB HTPC HTPD HTPE | Human Pancreas Tumor | Uni-ZAP XR | LP03 |
| HTTA HTTB HTTC HTTD HTFE | Human Testes Tumor | Uni-ZAP XR | LP03 |
| HTTF | | | |
| HAPA HAPB HAPC HAPM | Human Adult Pulmonary | Uni-ZAP XR | LP03 |
| HETA HETB HETC HETD HETE | Human Endometrial Tumor | Uni-ZAP XR | LP03 |
| HETF HETG HIETH HETI | | | |
| HHFB HHFC HHFD HHFE HHFF | Human Fetal Heart | Uni-ZAP XR | LP03 |
| HHFG HHFH HHFI | | | |
| HHPB HHPC HHPD HHPE HHPF | Human Hippocampus | Uni-ZAP XR | LP03 |
| HHPG HHPH | | | |
| HCE1 HCE2 HCE3 HCE4 HCE5 | Human Cerebellum | Uni-ZAP XR | LP03 |
| HCEB HCEC HCED HCEE HCEF | | | |
| HCEG | | | |
| HUVB HUVC HUVD HUVE | Human Umbilical Vein, Endo. remake | Uni-ZAP XR | LP03 |
| HSTA HSTB HSTC HSTD | Human Skin Tumor | Uni-ZAP XR | LP03 |
| HTAA HTAB HTAC HTAD HTAE | Human Activated T-Cells | Uni-ZAP XR | LP03 |
| HFEA HFEB HFEC | Human Fetal Epithelium (Skin) | Uni-ZAP XR | LP03 |
| HJPA HJPB HJPC HJPD | HUMAN JIRKAT MEMBRANE | Uni-ZAP XR | LP03 |
| | BOUND POLYSOMES | | |
| HESA | Human epithelioid sarcoma | Uni-Zap XR | LP03 |
| HLTA HLTB HLTC HLTD HLTE | Human T-Cell Lymphoma | Uni-ZAP XR | LP03 |
| HFTA HFTB HFTC HFTD | Human Fetal Dura Mater | Uni-ZAP XR | LP03 |
| HRDA HRDB HRDC HRDD HRDE | Human Rhabdomyosarcoma | Uni-ZAP XR | LP03 |
| HCAA UCAB HCAC | Cem cells cyclohexamide treated | Uni-ZAP XR | LP03 |
| HRGA HRGB HRGC HRGD | Raji Cells, cyclohexamide treated | Uni-ZAP XR | LP03 |
| HSUA HSUB HSUC HSUM | Supt Cells, cyclohexamide treated | Uni-ZAP XR | LP03 |
| HT4A HT4C HT4D | Activated T-Cells, 12 hrs. | Uni-ZAP XR | LP03 |
| HE9A HE9B HE9C HE9D HE9E | Nine Week Old Early Stage Human | Uni-ZAP XR | LP03 |
| HATA HATB HATC HATD HATE | Human Adrenal Gland Tumor | Uni-ZAP XR | LP03 |
| HT5A | Activated T-Cells, 24 hrs. | Uni-ZAP XR | LP03 |
| HFGA HFGM | Human Fetal Brain | Uni-ZAP XR | LP03 |
| HNEA HNEB HNEC HNED HNEE | Human Neutrophil | Uni-ZAP XR | LP03 |
| HBGB HBGD | Human Primary Breast Cancer | Uni-ZAP XR | LP03 |
| HBNA HBNB | Human Normal Breast | Uni-ZAP XR | LP03 |
| HCAS | Cem Cells, cyclohexamide treated, | Uni-ZAP XR | LP03 |
| | subtra | | |
| HHPS | Human Hippocampus, subtracted | pBS | LP03 |
| HKCS HKCU | Human Colon Cancer, subtracted | pBS | LP03 |
| HRGS | Raji cells, cyclohexamide treated | pBS | LP03 |
| | subtracted | | |
| HSUT | Supt cells, cyclohexamide treated | pBS | LP03 |
| | differentially expressed | | |
| HT4S | Activated T-Cells, 12 hrs, subtracted | Uni-ZAP XR | LP03 |
| HCDA HCDB HCDC HCDD HCDE | Human Chondrosarcoma | Uni-ZAP XR | LP03 |
| HOAA HOAB HOAC | Human Osteosarcoma | Uni-ZAP XR | LP03 |
| HTLA HTLB HTLC HTLD HTLE | Human adult testis, large inserts | Uni-ZAP XR | LP03 |
| HLMA HLMC HLMD | Breast Lymph node cDNA library | Uni-ZAP XR | LP03 |
| H6EA H6EB H6EC | HL-60, PMA 4H | Uni-ZAP XR | LP03 |
| HTXA HTXB HTXC HTXD HTXE | Activated T-Cell (12 hs)/Thiouridine | Uni-ZAP XR | LP03 |
| HTXF HTXG HTXH | labelledEco | | |
| HNFA HNFB HNFC HNFD HNFE | Human Neutrophil, Activated | Uni-ZAP XR | LP03 |
| HNFF HNFG HNFH HNFJ | | | |
| HTOB HTOC | HUMAN TONSILS, FRACTION 2 | Uni-ZAP XR | LP03 |
| HMGB | Human OB MG63 control fraction I | Uni-ZAP XR | LP03 |
| HOPB | Human OB HOS control fraction I | Uni-ZAP XR | LP03 |
| HORB | Human OB HOS treated (10 nM E2) | Uni-ZAP XR | LP03 |
| | fraction I | | |
| HSVA HSVB HSVC | Human Chronic Synovitis | Uni-ZAP XR | LP03 |
| HROA | HUMAN STOMACH | Uni-ZAP XR | LP03 |
| HBJA HBJB HBJC HBJD HBJE | HUMAN B CELL LYMPHOMA | Uni-ZAP XR | LP03 |
| HBJF HBJG HBJH HBJI HBJJ HBJK | | | |
| HCRA HCRB HCRC | human corpus colosum | Uni-ZAP XR | LP03 |
| HODA HODB HODC HODD | human ovarian cancer | Uni-ZAP XR | LP03 |
| HDSA | Dermatofibrosarcoma Protuberance | Uni-ZAP XR | LP03 |
| HMWA HMWB HMWC HMWD | Bone Marrow Cell Line (RS4; 11) | Uni-ZAP XR | LP03 |
| HMWE HMWF HMWG HMWH | | | |
| HMWI HMWJ | | | |
| HSOA | stomach cancer (human) | Uni-ZAP XR | LP03 |
| HERA | SKIN | Uni-ZAP XR | LP03 |
| HMDA | Brain-medulloblastoma | Uni-ZAP XR | LP03 |
| HGLA HGLB HGLD | Glioblastoma | Uni-ZAP XR | LP03 |
| HEAA | H. Atrophic Endometrium | Uni-ZAP XR | LP03 |
| HBCA HBCB | Lymph node breast Cancer | Uni-ZAP XR | LP03 |
| HPWT | Human Prostate BPH, re-excision | Uni-ZAP XR | LP03 |
| HFVG HFVH HFVI | Fetal Liver, subtraction II | pBS | LP03 |
| HNFI | Human Neutrophils, Activated, re- | pBS | LP03 |
| | excision | | |
| HBMB HBMC HBMD | Human Bone Marrow, re-excision | pBS | LP03 |
| HKML HKMM HKMN | Kidney Medulla, re-excision | pBS | LP03 |
| HKIX HKIY | Kidney Cortex, subtracted | pBS | LP03 |
| HADT | H. Amygdala Depression, subtracted | pBS LP03 | |
| H6AS | HI-60, untreated, subtracted | Uni-ZAP XR | LP03 |
| H6ES | HL-60, PMA 4H, subtracted | Uni-ZAP XR | LP03 |
| H6BS | HL-60, RA 4h, Subtracted | Uni-ZAP XR | LP03 |
| H6CS | HL-60, PMA 1d, subtracted | Uni-ZAP XR | LP03 |
| HTXJ HTXK | Activated T-cell(12h)IThiouridine-re- | Uni-ZAP XR | LP03 |
| | excision | | |
| HMSA HMSB HMSC HMSD HMSE | Monocyte activated | Uni-ZAP XR | LP03 |
| HMSF HMSG HMSH HMSI HMSJ | | | |
| HMSK | | | |
| HAGA HAGB HAGC HAGD HAGE | Human Amygdala | Uni-ZAP XR | LP03 |
| HAGF | | | |
| HSRA HSRB USRE | STROMAL-OSTEOCLASTOMA | Uni-ZAP XR | LP03 |
| HSRD HSRF HSRG HSRH | Human Osteoclastoma Stromal Cells - | Uni-ZAP XR | LP03 |
| | unamplified | | |
| HSQA HSQB HSQC HSQD HSQE | Stromal cell TF274 | Uni-ZAP XR | LP03 |
| HSQF HSQG | | | |
| HSKA HSKB HSKC HSKD HSKE | Smooth muscle, serum treated | Uni-ZAP XR | LP03 |
| HSKF HSKZ | | | |
| HSLA HSLB HSLC HSLD HSLE | Smooth muscle,control | Uni-ZAP XR | LP03 |
| HSLF HSLG | | | |
| HSDA HSDD HSDE HSDF HSDG | Spinal cord | Uni-ZAP XR | LP03 |
| HSDH | | | |
| HPWS | Prostate-BPH subtracted II | pBS | LP03 |
| HSKW HSKX HSKY | Smooth Muscle-HASTE normalized | pBS | LP03 |
| HFPB HFPC HFPD | H. Frontal cortex, epileptic; re-excision | Uni-ZAP XR | LP03 |
| HSDL HSDJ HSDK | Spinal Cord, re-excision | Uni-ZAP XR | LP03 |
| HSKN HSKO | Smooth Muscle Serum Treated, Norm | pBS | LP03 |
| H5KG HSKIH HSKI | Smooth muscle, serum induced, re-exc | pBS | LP03 |
| HFCA HFCB HFCC HFCD HFCE | Human Fetal Brain | Uni-ZAP XR | P04 |
| HFCF | | | |
| HPTA HPTB HPTD | Human Pituitary | Uni-ZAP XR | P04 |
| HTHB HTHC HTHD | Human Thymus | Uni-ZAP XR | P04 |
| HE6B HE6C HE6D HE6E HE6F | Human Whole Six Week Old Embryo | Uni-ZAP XR | P04 |
| HE6G HE6S | | | |
| HSSA HSSB HSSC HSSD HSSE | Human Synovial Sarcoma | Uni-ZAP XR | 04 |
| HSSF HSSG HSSH HSSI HSSJ | | | |
| HSSK | | | |
| HE7T | 7 Week Old Early Stage Human, | Uni-ZAP XR | P04 |
| HEPA HEPB HEPC | Human Epididymus | Uni-ZAP XR | P04 |
| HSNA HSNB HSNC HSNM HSNN | Human Synovium | Uni-ZAP XR | P04 |
| HPFB HPFC HPFD HPFE | Human Prostate Cancer, Stage C fraction | Uni-ZAP XR | P04 |
| HE2A HE2D HE2E HE2H HE2I | 12 Week Old Early Stage Human | Uni-ZAP XR | P04 |
| HE2M HE2N HE2O | | | |
| HE2B HE2C HE2F HE2G HE2P | 12 Week Old Early Stage Human, II | Uni-ZAP XR | P04 |
| HE2Q | | | |
| HPTS HPTT HPTU | Human Pituitary, subtracted | Uni-ZAP XR | P04 |
| HAUA HAUB HAUC | Amniotic Cells - TNF induced | Uni-ZAP XR | P04 |
| HAQA HAQB HAQC HAQD | Amniotic Cells - Primary Culture | Uni-ZAP XR | P04 |
| HWTA HWTB HWTC | wilm's tumor | Uni-ZAP XR | P04 |
| hBSD | bone Cancer, re-excision | Uni-ZAP XR | P04 |
| hSGB | Salivary gland, re-excision | Uni-ZAP XR | P04 |
| HSJA HSJB HSJC | Smooth muscle-ILb induced | Uni-ZAP XR | P04 |
| HSXA HSXB HSXC HSXD | Human Substantia Nigra | Uni-ZAP XR | P04 |
| HSHA HSHB HSHC | Smooth muscle, IL1b induced | Uni-ZAP XR | P04 |
| HOUA HOUB HOUC HOUD HOUE | Adipocytes | Uni-ZAP XR | P04 |
| HPWA HPWB HPWC HPWD | Prostate BPH | Uni-ZAP XR | P04 |
| HPWE | | | |
| HELA HELB HELC HELD HELE | Endothelial cells-control | Uni-ZAP XR | P04 |
| HELF HELG HELH | | | |
| HEMA HEMB HEMC HEMD | Endothelial-induced | Uni-ZAP XR | P04 |
| HEME HEMF HEMG HEMG | | | |
| HBIA HBIB HBIC | Human Brain, Striatum | Uni-ZAP XR | P04 |
| HHSA HHSB HHSC HHSD HHSE | Human Hypothalmus, Schizophrenia | Uni-ZAP XR | P04 |
| HNGA HNGB HNGC HNGD HNGE | neutrophils control | Uni-ZAP XR | P04 |
| HNGF HNGG HNGH UNGI HNGJ | | | |
| HNHA HNHB HNHC HNHD UNHE | Neutrophils IL-1 and LPS induced | Uni-ZAP XR | P04 |
| HNHG HNHH HNHI HNHJ | | | |
| HSDB HSDC | STRIATUM DEPRESSION | Uni-ZAP XR | P04 |
| HHPT | Hypothalamus | Uni-ZAP XR | P04 |
| HSAT HSAU HSAV HSAW HSAX | Anergic T-cell | Uni-ZAP XR | P04 |
| HSAY HSAZ | | | |
| HBMS HBMT HBMU HBMV | Bone marrow | Uni-ZAP XR | P04 |
| HBMW HBMX | | | |
| HOEA HOER HOEC HOED HOEE | Osteoblasts | Uni-ZAP XR | P04 |
| HOEF HOEJ | | | |
| HAIA HAIR HAIC HAID HAIE | Epithelial-TNFa and NP induced | Uni-ZAP XR | P04 |
| HALP | | | |
| HTGA HTGB HTGC HTGD | Apoptotic T-cell | Uni-ZAP XR | P04 |
| HMCA HMCB HMCC HMCD | Macrophage-oxLDL | Uni-ZAP XR | P04 |
| HMCE | | | |
| HMAA HMAB HMAC HMAD | Macrophage (GM-CSF treated) | Uni-ZAP XR | P04 |
| HMAE HMAF HMAG | | | |
| HPHA | Normal Prostate | Uni-ZAP XR | P04 |
| HPIA HPIB HPIC | LNCAP prostate cell line | Uni-ZAP XR | P04 |
| HPJA HPJB HPJC | PC3 Prostate cell line | Uni-ZAP XR | P04 |
| HOSE HOSF HOSG | Human Osteoclastoma, re-excision | Uni-ZAP XR | P04 |
| HTGE HTGF | Apoptotic T-cell, re-excision | Uni-ZAP XR | P04 |
| HMAJ HMAK | H Macrophage (GM-CSF treated), re- | Uni-ZAP XR | P04 |
| | excision | | |
| HACB HACC HACD | Human Adipose Tissue, re-excision | Uni-ZAP XR | P04 |
| HFPA | H. Frontal Cortex, Epileptic | Uni-ZAP XR | P04 |
| HFAA HEAR HFAC HEAD HEAE | Alzheimers, spongy change | Uni-ZAP XR | P04 |
| HFAM | Frontal Lobe, Dementia | Uni-ZAP XR | P04 |
| HMIA HMIB HMIC | Human Manic Depression Tissue | Uni-ZAP XR | P04 |
| HTSA HTSE HTSF HTSG HTSH | Human Thymus | pBS | P05 |
| HPBA HERB HPBC HPBD HPBE | Human Pineal Gland | pBS | P05 |
| HSAA HSAB HSAC | HSA 172 Cells | pBS | P05 |
| HSBA HSBB HSBC HSBM | HSC172 cells | pBS | P05 |
| HJAA HJAB HJAC HJAD | Jurkat T-cell GI phase | pBS | P05 |
| HJRA HJBR HJBC HJBD | Jurkat T-Cell, S phase | pBS | P05 |
| HAFA HAFB | Aorta endothelial cells + TNF-a | pBS | P05 |
| HAWA HAWR HAWC | Human White Adipose | pBS | P05 |
| HTNA HTNB | Human Thyroid | pBS | P05 |
| HONA | Normal Ovary, Premenopausal | pBS | P05 |
| HARA HARB | Human Adult Retina | pBS | P05 |
| HLJA HLJB | Human Lung | pCMBSport 1 | LP06 |
| HOFM HOFN HOFO | H. Ovarian Tumor, II, OV5232 | pCMVSport 2.0 | P07 |
| HOGA HOGB HOGC | OV 10-3-95 | pCMVSport 2.0 | P07 |
| HCGL | CD34 + cells, II | pCMVSport 2.0 | P07 |
| HDLA | Hodgkin's Lymphoma I | pCMVSport 2.0 | P07 |
| HTA HDTB HDTC HDTD HDTE | Hodgkin's Lymphoma II | CMVSport 2.0 | P07 |
| HKAA HKAB HKAC HKAD HKAE | Kerarinocyte | pCMVSport2.0 | P07 |
| HKAF HKAG HKAH | | | |
| HCIM | CAPFINDER, Crohn's Disease, lib 2 | pCMVSport2.0 | P07 |
| HKAL | Keratinocyte, lib 2 | pCMVSport2.0 | P07 |
| HKAT | Keratinocyte, lib 3 | pCMVSport2.0 | P07 |
| HNDA | Nasal polyps | pCMVSport2.0 | P07 |
| HDRA | H. Primary Dendritic Cells, lib 3 | pCMVSport2.0 | P07 |
| HOHA HOHB HOHC | Human Osteoblasts II | pCMVSport2.0 | P07 |
| HLDA HLDB HLDC | Liver, Hepatoma | pCMVSport3.0 | P08 |
| HLDN HLDO HLDP | Human Liver, normal | pCMVSport3.0 | P08 |
| HMTA | pBMC stimulated w/poly I/C | pCMVSport3.0 | P08 |
| HNTA | NTERA2, control | pCMVSport3.0 | P08 |
| HDPA HDPB HDPC HDPD HDPF | Primary Dendritic Cells, lib 1 | pCMVSport3.0 | P08 |
| HDPG HDPH HDPI HDPJ HDPK | | | |
| HDPM HDPN HDPO HDPP | Primary Dendritic cells, frac 2 | pCMVSport3.0 | P08 |
| HMUA HMUB HMUC | Myoloid Progenitor Cell Line | pCMVSport3.0 | P08 |
| HHEA HHEB HHEC HHED | T Cell helper I | pCMVSport3.0 | P08 |
| HHEM HHEN HHEO HHEP | T cell helper II | pCMVSport3.0 | P08 |
| HEQA HEQB HEQC | Human endometrial stromal cells | pCMVSport3.0 | P08 |
| HJMA HJMB | Human endometrial stromal cells-treated | pCMVSport3.0 | P08 |
| | with progesterone | | |
| HSWA HSWB HSWC | Human endometrial stromal cells-treated | pCMVSport3.0 | P08 |
| | with estradiol | | |
| HSYA HSYB HSYC | Human Thymus Stromal Cells | pCMVSport3.0 | P08 |
| HLWA HLWB HLWC | Human Placenta | pCMVSport3.0 | P08 |
| HRAA HRAB URAC | Rejected Kidney, lib 4 | pCMVSport3.0 | P08 |
| HMTM | PCR, pBMC I/C treated | PCRII | LP09 |
| HMJA | H. Meniingima, M6 | pSport 1 | LP10 |
| HMKA HMKB HMKC HMKD | H. Meningima, M1 | pSport 1 | LP10 |
| HMKE | | | |
| HUSG HUSI | Human umbilical vein endothelial cells, | pSport 1 | LP10 |
| | IL-4 induced | | |
| HUSX HUSY | Human Umbilical Vein Endothelial | pSport 1 | LP10 |
| | Cells, uninduced | | |
| HOFA | Ovarian Tumor I, OV5232 | pSport 1 | LP10 |
| HCFA HCFB HCFC HCFD | T-Cell PHA 16 hrs | pSport 1 | LP10 |
| HCFL HCFM HCFN HCFO | T-Cell PHA 24 hrs | pSport 1 | LP10 |
| HADA HADC HADD HADE HADF | Human Adipose | pSport 1 | LP10 |
| HADG | | | |
| HOVA HOVB HOVC | Human Ovary | pSport 1 | LP10 |
| HTWB HTWC HTWD HTWE | Resting T-Cell Library, II | pSport 1 | LP10 |
| HMMA | Spleen metastic melanoma | pSport 1 | LP10 |
| HLYA HLYB HLYC HLYD HLYE | Spleen, Chronic lymphocytic leukemia | pSport 1 | LP10 |
| HCGA | CD34 + cell, I | pSport 1 | LP10 |
| HEOM HEON | Human Eosinophils | pSport 1 | LP10 |
| HTDA | Human Tonsil, Lib 3 | pSport 1 | LP10 |
| HSPA | Salivary Gland, Lib 2 | pSport 1 | LP10 |
| HCHA HCHB HCHC | Breast Cancer cell line, MDA 36 | pSport 1 | LP10 |
| HCHM HCHN | Breast Cancer Cell line, angiogenic | pSport 1 | LP10 |
| HCIA | Crohn's Disease | pSport 1 | LP10 |
| HDAA HDAB HDAC | HEL cell line | pSport 1 | LP10 |
| HABA | Human Astrocyte | pSport 1 | LP10 |
| HUFA HUFB HUFC | Ulcerative Colitis | pSport 1 | LP10 |
| HNTM | NTERA2 + retinoic acid, 14 days | pSport 1 | LP10 |
| HDQA | Primary Dendritic cells, CapFinder2, frac | pSport 1 | LP10 |
| | 1 | | |
| HDQM | Primary Dendritic Cells, CapFinder, frac | pSport 1 | LP10 |
| | 2 | | |
| HLDX | Human Liver, normal,CapFinder □□□□ | pSport 1 | LP10 |
| HULA HULB HULC | Human Dermal Endothelial | pSport 1 | LP10 |
| | Cells, untreated | | |
| HUMA | Human Dermal Endothelial cells, treated | pSport 1 | LP10 |
| HCIA | Human Stromal Endometrial fibroblasts, | pSport 1 | LP10 |
| | untreated | | |
| HCIM | Human Stromal endometrial fibroblasts, | pSport 1 | LP10 |
| | treated w/estradiol | | |
| HEDA | Human Stromal endometrial fibroblasts, | pSport 1 | LP10 |
| | treated with progesterone | | |
| HFNA | Human ovary tumor cell OV350721 | pSport 1 | LP10 |
| HKGA HKGB HKGC HKGD | Merkel Cells | pSport 1 | LP10 |
| HISA HISB HISC | Pancreas Islet Cell Tumor | pSport 1 | LP10 |
| HLSA | Skin, burned | pSport 1 | LP10 |
| HBZA | Prostate, BPH, bib 2 | pSport 1 | LP10 |
| HBZS | Prostate BPH, Lib 2, subtracted | pSport 1 | LP10 |
| HFIA HFIB HFIC | Synovial Fibroblasts (control) | pSport 1 | LP10 |
| HFIH HFII HFIJ | Synovial hypoxia | pSport 1 | LP10 |
| HFIT HFIU HFIV | Synovial IL-1/TNF stimulated | pSport 1 | LP10 |
| HGCA | Messangial cell, frac 1 | pSport 1 | LP10 |
| HMVA HMVB HMVC | Bone Marrow Stromal Cell, untreated | pSport 1 | LP10 |
| HFIX HFIY HFIZ | Synovial Fibroblasts (III/TNF), subt | pSport 1 | LP10 |
| HFOX HFOY HFOZ | Synovial hypoxia-RSF subtracted | pSport 1 | LP10 |
| HMQA HMQB HMQC HMQD | Human Activated Monocytes | Uni-ZAP XR | LP11 |
| HLIA HLIB HLIC | Human Liver | pCMVSport 1 | LP012 |
| HHBA HHBB HHBC HHBD HHBE | Human Heart | pCMVSport 1 | LP012 |
| HBBA HBBB | Human Brain | pCMVSport 1 | LP012 |
| HLIA HLJB HLJC HLJD HLJE | Human Lung | pCMVSport 1 | LP012 |
| HOGA HOGB HOGC | Ovarian Tumor | pCMVSport 2.0 | LP012 |
| HTJM | Human Tonsils, Lib 2 | pCMVSport 2.0 | LP012 |
| HAMF HAMG | KMH2 | pCMVSport 3.0 | LP012 |
| HAJA HAJB HAJC | L428 | pCMVSport 3.0 | LP012 |
| HWBA HWBB HWBC HWBD | Dendritic cells, pooled | pCMVSport 3.0 | LP012 |
| HWBE | | | |
| HWAA HWAB HWAC HWAD | Human Bone Marrow, treated | pCMVSport 3.0 | LP012 |
| HWAE | | | |
| HYAA HYAB HYAC | B Cell lymphoma | pCMVSport 3.0 | LP012 |
| HWHG HWHH HWHI | Healing groin wound, 6.5 hours post | pCMVSport 3.0 | LP012 |
| | incision | | |
| HWHP HWHQ HWHR | Healing groin wound; 7.5 hours post | pCMVSport 3.0 | LP012 |
| | incision | | |
| HARM | Healing groin wound - zero hr post- | pCMVSport 3.0 | LP012 |
| | incision (control) | | |
| HBIM | Olfactory epithelium; nasalcavity | pCMVSport 3.0 | LP012 |
| HWDA | Healing Abdomen wound; 70 & 90 min | pCMVSport 3.0 | LP012 |
| | post incision | | |
| HWEA | Healing Abdomen Wound; 15 days post | pCMVSport 3.0 | LP012 |
| | incision | | |
| HWJA | Healing Abdomen Wound; 21 & 29 days | pCMVSport 3.0 | LP012 |
| HNAL | Human Tongue, frac 2 | pSport1 | P012 |
| HMJA | H. Meniingima, M6 | pSport1 | P012 |
| HMKA HMKB HMKC HMKD | H. Meningima, M1 | pSport1 | P012 |
| HMKE | | | |
| HOFA | Ovarian Tumor I, OV5232 | pSport1 | P012 |
| HCFA HCFB HCFC HCFD | T-Cell PHA 16 hrs | pSport1 | P012 |
| HCFL HCFM HCFN HCFO | T-Cell PHA 24 hrs | pSport1 | P012 |
| HMMA HMMB HMMC | Spleen metastic melanoma | pSport1 | P012 |
| HTDA | Human Tonsil, Lib 3 | pSport1 | P012 |
| HDBA | Human Fetal Thymus | pSport1 | P012 |
| HDUA | Pericardium | pSport1 | P012 |
| HBZA | Prostate, BPH, Lib 2 | pSport1 | P012 |
| HWCA | Larynx tumor | pSport1 | P012 |
| HWKA | Normal lung | pSport1 | P012 |
| HSMB | Bone marrow stroma, treated | pSport1 | P012 |
| HBHM | Normal trachea | pSport1 | P012 |
| HLFC | Human Larynx | pSport1 | P012 |
| HLRB | Siebben Polyposis | pSport1 | P012 |
| HNIA | Mammary Gland | pSport1 | P012 |
| HNJB | Palate carcinoma | pSport1 | P012 |
| HNKA | Palate normal | pSport1 | P012 |
| HMZA | Pharynx carcinoma | pSport1 | P012 |
| HABG | Cheek Carcinoma | pSport1 | P012 |
| HMZM | Pharynx Carcinoma | pSport1 | P012 |
| HDRM | Larynx Carcinoma | pSport1 | P012 |
| HVAA | Pancreas normal PCA4 No | pSport1 | P012 |
| HICA | Tongue carcinoma | pSport1 | P012 |
| HUKA HUKB HUKC HUKD HUKE | Human Uterine Cancer | Lambda ZAP II | LP013 |
| HFFA | Human Fetal Brain, random primed | Lambda ZAP II | LP013 |
| HTUA | Activated T-cell labeled with 4-thioluri | Lambda ZAP II | LP013 |
| HBQA | Early Stage Human Brain, random | Lambda ZAP II | LP013 |
| | primed | | |
| HMEB | Human microvascular Endothelial cells, | Lambda ZAP II | LP013 |
| | fract. B | | |
| HUSH | Human Umbilical Vein Endothelial | Lambda ZAP II | LP013 |
| | cells, fract. A, re-excision | | |
| HLQC HLQD | Hepatocellular tumor, re-excision | Lambda ZAP II | LP013 |
| HTWJ HTWK HTWL | Testing T-cell, re-excision | Lambda ZAP II | LP013 |
| HF6S | Human Whole 6 week Old Embryo (II), | pBluescript | LP013 |
| | subt | | |
| HHPS | Human Hippocampus, subtracted | pBluescript | LP013 |
| HL1S | LNCAP, differential expression | pBluescript | LP013 |
| HLHS HLHT | Early Stage Human Lung, Subtracted | pBluescript | LP013 |
| HSUS | Supt cells, cyclohexamide treated, | pBluescript | LP013 |
| | subtracted | | |
| HSUT | Supt cells, cyclohexamide treated, | pBluescript | LP013 |
| | differentially expressed | | |
| HSDS | H. Striatum Depression, subtracted | pBluescript | LP013 |
| HPTZ | Human Pituitary, Subtracted VII | pBluescript | LP013 |
| HSDX | H. Striatum Depression, subt II | pBluescript | LP013 |
| HSDZ | H. Striatum Depression, subt | pBluescript | LP013 |
| HPBA HPBB HPBC HPBD HPBE | Human Pineal Gland | pBluescript SK- | LP013 |
| HRTA | Colorectal Tumor | pBluescript SK- | LP013 |
| HSBA HSBB HSBC HSBM | HSC172 cells | pBluescript SK- | LP013 |
| HJAA HJAB HJAC HJAD | Jurkat T-cell G1 phase | pBluescript SK- | LP013 |
| HJBA HJBB HJBC HJBD | Jurkat T-ceII, S1 phase | pBluescript SK- | LP013 |
| HTNA HTNB | Human Thyroid | pBluescript SK- | LP013 |
| HAHA HAHB | Human Adult Heart | Uni-ZAP XR | LP013 |
| HE6A | Whole 6 week Old Embryo | Uni-ZAP XR | LP013 |
| HFCA HFCB HFCC HFCD HFCE | Human Fetal Brain | Uni-ZAP XR | LP013 |
| HFKC HFKD HFKE HFKF HFKG | Human Fetal Kidney | Uni-ZAP XR | LP013 |
| GBA HGBD HGBE HGBF HGBG | Human Gall Bladder | Uni-ZAP XR | LP013 |
| HPRA HPRB HPRC HPRD | Human Prostate | Uni-ZAP XR | LP013 |
| HTEA HTEB HTEC HTED HTEE | Human Testes | Uni-ZAP XR | LP013 |
| HTTA HTTB HTTC HTTD HTI7E | Human Testes Tumor | Uni-ZAP XR | LP013 |
| HYBA HYBB | Human Fetal Bone | Uni-ZAP XR | LP013 |
| HFLA | Human Fetal Liver | Uni-ZAP XR | LP013 |
| HHFB HHFC HHFD HHFE HHFF | Human Fetal Heart | Uni-ZAP XR | LP013 |
| HUVB HUVC HHVD HUVE | Human Umbilical Vein, End. remake | Uni-ZAP XR | LP013 |
| HTHB HTHC HTHD | Human Thymus | Uni-ZAP XR | LP013 |
| HSTA HSTB HSTC HSTD | Human Skin Tumor | Uni-ZAP XR | LP013 |
| HTAA HTAB HTAC HTAD HTAE | Human Activated T-cells | Uni-ZAP XR | LP013 |
| HFEA HFEB HFEC | Human Fetal Epithelium (skin) | Uni-ZAP XR | LP013 |
| HJPA HJPB HJPC HJPD | Human Jurkat Membrane Bound | Uni-ZAP XR | LP013 |
| | polysomes | | |
| HESA | Human Epithelioid Sarcoma | Uni-ZAP XR | LP013 |
| HALS | Human Adult Liver, Subtracted | Uni-ZAP XR | LP013 |
| HFTA HFTB HFTC HFTD | Human Fetal Dura Mater | Uni-ZAP XR | LP013 |
| HCAA HCAB HCAC | Cem cells, cyclohexamide treated | Uni-ZAP XR | LP013 |
| HRGA HRGB HRGC HRGD | Raji Cells, cyclohexamide treated | Uni-ZAP XR | LP013 |
| HE9A HE9B HE9C HE9D HE9E | Nine Week Old Early Stage Human | Uni-ZAP XR | LP013 |
| HSFA | Human Fibrosarcoma | Uni-ZAP XR | LP013 |
| HATA HATB HATC HATD HATE | Human Adrenal Gland Tumor | Uni-ZAP XR | LP013 |
| HTRA | Human Trachea Tumor | Uni-ZAP XR | LP013 |
| HE2A HE2D HE2E HE2H HE2I | 12 Week Old Early Stage Human | Uni-ZAP XR | LP013 |
| HE2B HE2C HE2F HE2G HE2P | 12 Week Old Early Stage Human, II | Uni-ZAP XR | LP013 |
| HNEA HNEB HNEC HNED HNEE | Human Neutrophil | Uni-ZAP XR | LP013 |
| HBGA | Human Primary Breast Cancer | Uni-ZAP XR | LP013 |
| HPTS HPTT HPTU | Human Pituitary, subtracted | Uni-ZAP XR | LP013 |
| HMQA HMQB HMQC HMQD | Human Activated Monocytes | Uni-ZAP XR | LP013 |
| HOAA HOAB HOAC | Human Osteosarcoma | Uni-ZAP XR | LP013 |
| HTOA HTOD HTOE HTOF HTOG | human tonsils | Uni-ZAP XR | LP013 |
| HMGB | Human OB MG63 control fraction I | Uni-ZAP XR | LP013 |
| HOPB | Human OB HOS control fraction I | Uni-ZAP XR | LP013 |
| HOQB | Human OB HOS treated (1 nM E2) | Uni-ZAP XR | LP013 |
| | fraction I | | |
| HAUA HAUB HAUC | Amniotic Cells - TNF induced | Uni-ZAP XR | LP013 |
| HAQA HAQB HAQC HAQD | Amniotic Cells - Primary Culture | Uni-ZAP XR | LP013 |
| HROA HROC | HUMAN STOMACH | Uni-ZAP XR | LP013 |
| HBJA HBJB HBJC HBJD HBJE | HUMAN 13 CELL LYMPHOMA | Uni-ZAP XR | LP013 |
| HODA HODB HODC HODD | human ovarian cancer | Uni-ZAP XR | LP013 |
| HCPA | Corpus Callosum | Uni-ZAP XR | LP013 |
| HSOA | stomach cancer (Human) | Uni-ZAP XR | LP013 |
| HERA | SKIN | Uni-ZAP XR | LP013 |
| HMDA | Brain-medulloblastoma | Uni-ZAP XR | LP013 |
| HGLA HGLB HOLD | Glioblastoma | Uni-ZAP XR | LP013 |
| HWTA HWTB HWTC | wilm's tumor | Uni-ZAP XR | LP013 |
| HEAA | H. Atrophic Endometrium | Uni-ZAP XR | LP013 |
| HAPN HAPO HAPP HAPQ HAPR | Human Adult Pulmonary; re-excision | Uni-ZAP XR | LP013 |
| HLTG HLTH | Human T-cell lymphoma; re-excision | Uni-ZAP XR | LP013 |
| HAHC HAHD HAHE | Human Adult Heart; re-excision | Uni-ZAP XR | LP013 |
| HGA HAGB HAGC HAGD HAGE | Human Amygdala | Uni-ZAP XR | LP013 |
| HSJA HSJB HSJC | Smooth muscle-ILb induced | Uni-ZAP XR | LP013 |
| HSHA HSHB HSHC | Smooth muscle, IL1b induced | Uni-ZAP XR | LP013 |
| HPWA HPWB HPWC HPWD | Prostate BPH | Uni-ZAP XR | LP013 |
| HPWE | | | |
| HPIA HPIB HPIC | LNCAP prostate cell line | Uni-ZAP XR | LP013 |
| HPJA HPJB HPJC | PC3 Prostate cell line | Uni-ZAP XR | LP013 |
| HBTA | Bone Marrow Stroma, TNF & LPS ind | Uni-ZAP XR | LP013 |
| HMCF HMCG HMCH HMCI HMCJ | Macrophage-oxLDL; re-excision | Uni-ZAP XR | LP013 |
| HAGG HAGH HAGI | Human Amygdala; re-excision | Uni-ZAP XR | LP013 |
| HACA | H. Adipose Tissue | Uni-ZAP XR | LP013 |
| HKFB | K562 + PMA (36 hrs), re-excision | ZAP Express | LP013 |
| HCWT HCWU HCWV | CD34 positive cells (cord blood), re-ex | ZAP Express | LP013 |
| HBWA | Whole brain | ZAP Express | LP013 |
| HBXA HBXB HBXC HBXD | Human Whole Brain #2 - Oligo dT> | ZAP Express | LP013 |
| | 1.5 Kb | | |
| HAVM | Temporal cortex-Alzheizmer | pT-Adv | LP014 |
| HAVT | Hippocampus, Alzheimer Subtracted | pT-Adv | LP014 |
| HHAS | CHME Cell Line | Uni-ZAP XR | LP014 |
| HAJR | Larynx normal | pSport 1 | LP014 |
| HWLE HWLF HWLG HWLH | Colon Normal | pSport 1 | LP014 |
| HCRM HCRN HCRO | Colon Carcinoma | pSport 1 | LP014 |
| HWLI HWLI HWLK | Colon Normal | pSport 1 | LP014 |
| HWLQ HWLR HWLS HWLT | Colon Tumor | pSport 1 | LP014 |
| HBFM | Gastrocnemius Muscle | pSport 1 | LP014 |
| HBOD HBOE | Quadriceps Muscle | pSport 1 | LP014 |
| HBKD HBKE | Soleus Muscle | pSport 1 | LP014 |
| HCCM | Pancreatic Langerhans | pSport 1 | LP014 |
| HWGA | Larynx carcinoma | pSport 1 | LP014 |
| HWGM HWGN | Larynx carcinoma | pSport 1 | LP014 |
| HWLA HWLB HWLC | Normal colon | pSport 1 | LP014 |
| HWLM HWLN | Colon Tumor | pSport 1 | LP014 |
| HVAM HVAN HVAO | Pancreas Tumor | pSport 1 | LP014 |
| HWGQ | Larynx carcinoma | pSport 1 | LP014 |
| HAQM HAQN | Salivary Gland | pSport 1 | LP014 |
| HASM | Stomach; normal | pSport 1 | LP014 |
| HBCM | Uterus; normal | pSport 1 | LP014 |
| HCDM | Testis; normal | pSport 1 | LP014 |
| HDJM | Brain; normal | pSport 1 | LP014 |
| HEFM | Adrenal Gland, normal | pSport 1 | LP014 |
| HBAA | Rectum normal | pSport 1 | LP014 |
| HFDM | Rectum tumour | pSport 1 | LP014 |
| HGAM | Colon, normal | pSport 1 | LP014 |
| HHMM | Colon, tumour | pSport 1 | LP014 |
| HCLB HCLC | Human Lung Cancer | Lambda Zap II | LP015 |
| HRLA | L1 Cell line | ZAP Express | LP015 |
| HHAM | Hypothalamus, Alzheimer's | pCMVSport 3.0 | LP015 |
| HKBA | Ku 812F Basophils Line | pSport 1 | LP015 |
| HS2S | Saos2, Dexamethosome Treated | pSport 1 | LP016 |
| HA5A | Lung Carcinoma A549 TNFalpha | pSport 1 | LP016 |
| | activated | | |
| HTFM | TF-1 Cell Line GM-CSF Treated | pSport 1 | LP016 |
| HYAS | Thyroid Tumour | pSport 1 | LP016 |
| HUTS | Larynx Normal | pSport 1 | LP016 |
| HXOA | Larynx Tumor | pSport 1 | LP016 |
| HEAH | Ea.hy.926 cell line | pSport 1 | LP016 |
| HINA | Adenocarcinoma Human | pSport 1 | LP016 |
| HRMA | Lung Mesothelium | pSport 1 | LP016 |
| HLCL | Human Pre-Differentiated Adipocytes | Uni-Zap XR | LP017 |
| HS2A | Saos2 Cells | pSport 1 | LP020 |
| HS2I | Saos2 Cells; Vitamin D3 Treated | pSport 1 | LP020 |
| HUCM | CHME Cell Line, untreated | pSport 1 | LP020 |
| HEPN | Aryepiglottis Normal | pSport 1 | LP020 |
| HPSN | Sinus Piniformis Tumour | pSport 1 | LP020 |
| HNSA | Stomach Normal | pSport 1 | LP020 |
| HNSM | Stomach Tumour | pSport 1 | LP020 |
| HNLA | Liver Normal Met 5 No | pSport 1 | LP020 |
| HUTA | Liver Tumour Met S Tu | pSport 1 | LP020 |
| HOCN | Colon Normal | pSport 1 | LP020 |
| HOCT | Colon Tumor | pSport 1 | LP020 |
| HTNT | Tongue Tumour | pSport 1 | LP020 |
| HLXN | Larynx Normal | pSport 1 | LP020 |
| HLXT | Larynx Tumour | pSport 1 | LP020 |
| HTYN | Thymus | pSport 1 | LP020 |
| HPLN | Placenta | pSport 1 | LP020 |
| HTNG | Tongue Normal | pSport 1 | LP020 |
| HZAA | Thyroid Normal (SDCA2 No) | pSport 1 | LP020 |
| HWES | Thyroid Thyroiditis | pSport 1 | LP020 |
| HFHD | Ficolled Human Stromal Cells, 5Fu | pTriplEx2 | LP021 |
| | treated | | |
| HMHM, HFHN | Ficolled Human Stromal Cells, | pTriplEx2 | LP021 |
| | untreated | | |
| HPCI | Hep G2 Cells, lambda library | Lambda Zap-CMV XR | LP021 |
| HBCA, HBCB, HBCC | Lymph node breast Cancer | Uni-ZAP XR | LP021 |
| HCOK | Chondrocytes | pSPORT1 | LP022 |
| HDCA, HDCB, HDCC | Dendritic Cells From CD34 Cells | pSPORT1 | LP022 |
| HDMA, HDMB | CD40 activated monocyte dendritic cells | pSPORT1 | LP022 |
| HDDM, HDDN, HDDO | LPS activated derived dendritic cells | pSPORT1 | LP022 |
| HPCR | Hep G2 Cells, PCR library | Lambda Zap-CMV XR | LP022 |
| HAAA, HAAB, HAAC | Lung, Cancer (4005313A3): Invasive | pSPORT1 | LP022 |
| | Poorly Differentiated Lung | | |
| | Adenocarcinoma | | |
| HIPA, HIPB, HIPC | Lung, Cancer (4005163 B7): Invasive, | pSPORT1 | LP022 |
| | Poorly Diff. Adenocarcinoma, | | |
| | Metastatic | | |
| HOOH, HOOI | Ovary, Cancer: (4004562 B6) Papillary | pSPORT1 | LP022 |
| | Serous Cystic Neoplasm, Low | | |
| | Malignant Pot | | |
| HIDA | Lung, Normal: (4005313 B1) | pSPORT1 | LP022 |
| HUJA, HUJB, HUJC, HUJD, HUJE | B-Cells | pCMVSport 3.0 | LP022 |
| HNOA, HNOB, HNOC, HNOD | Ovary, Normal: (9805C040R) | pSPORT1 | LP022 |
| HNLM | Lung, Normal: (4005313 B1) | pSPORT1 | LP022 |
| HSCL | Stromal Cells | pSPORT1 | LP022 |
| HAAX | Lung, Cancer: (4005313 A3) Invasive | pSPORT1 | LP022 |
| | Poorly-differentiated Metastatic lung | | |
| | adenocarcinoma | | |
| HUUA, HUUB, HUUC, HUUD | B-cells (unstimulated) | pTrip1Ex2 | LP022 |
| HWWA, HWWB, HWWC, HWWD, H | B-cells (stimulated) | pSPORT1 | LP022 |
| WWE,HWWF,HWWG | | | |
| HCCC | Colon, Cancer: (9808C064R) | pCMVSport 3.0 | LP023 |
| HPDO HPDP HPDQ HPDR HPD | Ovary, Cancer (9809C332): Poorly | pSport 1 | LP023 |
| | differentiated adenocarcinoma | | |
| HPCO HPCP HPCQ HPCT | Ovary, Cancer (15395A1F): Grade II | pSport 1 | LP023 |
| | Papillary Carcinoma | | |
| HOCM HOCO HOCP HOCQ | Ovary, Cancer: (15799A1F) Poorly | pSport 1 | LP023 |
| | differentiated carcinoma | | |
| HCBM HCBN HCBO | Breast, Cancer: (4004943 AS) | pSport 1 | LP023 |
| HNBT HNBU HNBV | Breast, Normal: (4005522B2) | pSport 1 | LP023 |
| HBCP HBCQ | Breast, Cancer: (4005522 A2) | pSport 1 | LP023 |
| HBC1 | Breast, Cancer: (9806C012R) | pSport 1 | LP023 |
| HSAM HSAN | Stromal cells 3.88 | pSport 1 | LP023 |
| HVCA HVCB HVCC HVCD | Ovary, Cancer: (4004332 A2) | pSport 1 | LP023 |
| HSCK HSEN HSEO | Stromal cells (HBM3.18) | pSport 1 | LP023 |
| HSCP HSCQ | stromal cell clone 2.5 | pSport 1 | LP023 |
| HUXA | Breast Cancer: (4005385 A2) | pSport 1 | LP023 |
| HCOM HCON HCOO HCOP HCOQ | Ovary, Cancer (4004650 A3): Well- | pSport 1 | LP023 |
| | Differentiated Micropapillary Serous | | |
| | Carcinoma | | |
| HBNM | Breast, Cancer: (9802C020E) | pSport 1 | LP023 |
| HVVA HVVB HVVC HVVD HVVE | Human Bone Marrow, treated | pSport 1 | LP023 |

[0833] Two approaches can be used to isolate a particular clone from the deposited sample of plasmid DNAs cited for that clone in Table 5. First, a plasmid is directly isolated by screening the clones using a polynucleotide probe corresponding to the nucleotide sequence of SEQ ID NO:X.

[0834] Particularly, a specific polynucleotide with 30-40 nucleotides is synthesized using an Applied Biosystems DNA synthesizer according to the sequence reported. The oligonucleotide is labeled, for instance, with ³²P-γ-ATP using T4 polynucleotide kinase and purified according to routine methods. (E.g., Maniatis et al., Molecular Cloning: A Laboratory Manual, Cold Spring Harbor Press, Cold Spring, N.Y. (1982).) The plasmid mixture is transformed into a suitable host, as indicated above (such as XL-1 Blue (Stratagene)) using techniques known to those of skill in the art, such as those provided by the vector supplier or in related publications or patents cited above. The transformants are plated on 1.5% agar plates (containing the appropriate selection agent, e.g., ampicillin) to a density of about 150 transformants (colonies) per plate. These plates are screened using Nylon membranes according to routine methods for bacterial colony screening (e.g., Sambrook et al., Molecular Cloning: A Laboratory Manual, 2nd Edit., (1989), Cold Spring Harbor Laboratory Press, pages 1.93 to 1.104), or other techniques known to those of skill in the art.

[0835] Alternatively, two primers of 17-20 nucleotides derived from both ends of the nucleotide sequence of SEQ I) NO:X are synthesized and used to amplify the desired cDNA using the deposited cDNA plasmid as a template. The polymerase chain reaction is carried out under routine conditions, for instance, in 25 μl of reaction mixture with 0.5 μg of the above cDNA template. A convenient reaction mixture is 1.5-5 mM MgCl₂, 0.01% (w/v) gelatin, 20 μM each of dATP, dCTP, dGTP, dTTP, 25 pmol of each primer and 0.25 Unit of Taq polymerase. Thirty five cycles of PCR (denaturation at 94° C. for 1 min; annealing at 55° C. for 1 min; elongation at 72° C. for 1 min) are performed with a Perkin-Elmer Cetus automated thermal cycler. The amplified product is analyzed by agarose gel electrophoresis and the DNA band with expected molecular weight is excised and purified. The PCR product is verified to be the selected sequence by subcloning and sequencing the DNA product.

[0836] Several methods are available for the identification of the 5′ or 3′ non-coding portions of a gene which may not be present in the deposited clone. These methods include but are not limited to, filter probing, clone enrichment using specific probes, and protocols similar or identical to 5′ and 3′ “RACE” protocols which are well known in the art. For instance, a method similar to 5′ RACE is available for generating the missing 5′ end of a desired full-length transcript. (Fromont-Racine et al., Nucleic Acids Res. 21(7):1683-1684 (1993).)

[0837] Briefly, a specific RNA oligonucleotide is ligated to the 5′ ends of a population of RNA presumably containing full-length gene RNA transcripts. A primer set containing a primer specific to the ligated RNA oligonucleotide and a primer specific to a known sequence of the gene of interest is used to PCR amplify the 5′ portion of the desired full-length gene. This amplified product may then be sequenced and used to generate the full length gene.

[0838] This above method starts with total RNA isolated from the desired source, although poly-A+ RNA can be used. The RNA preparation can then be treated with phosphatase if necessary to eliminate 5′ phosphate groups on degraded or damaged RNA which may interfere with the later RNA ligase step. The phosphatase should then be inactivated and the RNA treated with tobacco acid pyrophosphatase in order to remove the cap structure present at the 5′ ends of messenger RNAs. This reaction leaves a 5′ phosphate group at the 5′ end of the cap cleaved RNA which can then be ligated to an RNA oligonucleotide using T4 RNA ligase.

[0839] This modified RNA preparation is used as a template for first strand cDNA synthesis using a gene specific oligonucleotide. The first strand synthesis reaction is used as a template for PCR amplification of the desired 5′ end using a primer specific to the ligated RNA oligonucleotide and a primer specific to the known sequence of the gene of interest. The resultant product is then sequenced and analyzed to confirm that the 5′ end sequence belongs to the desired gene.

### Example 2

### Isolation of Genomic Clones Corresponding to a Polynucleotide

[0840] A human genomic P1 library (Genomic Systems, Inc.) is screened by PCR using primers selected for the sequence corresponding to SEQ ID NO:X, according to the method described in Example 1. (See also, Sambrook.)

### Example 3

### Tissue Specific Expression Analysis

[0841] The Human Genome Sciences, Inc. (HGS) database is derived from sequencing tissue specific cDNA libraries. Libraries generated from a particular tissue are selected and the specific tissue expression pattern of EST groups or assembled contigs within these libraries is determined by comparison of the expression patterns of those groups or contigs within the entire database. ESTs which show tissue specific expression are selected.

[0842] The original clone from which the specific EST sequence was generated, is obtained from the catalogued library of clones and the insert amplified by PCR using methods known in the art. The PCR product is denatured then transferred in 96 well format to a nylon membrane (Schleicher and Scheull) generating an array filter of tissue specific clones. Housekeeping genes, maize genes, and known tissue specific genes are included on the filters. These targets can be used in signal normalization and to validate assay sensitivity. Additional targets are included to monitor probe length and specificity of hybridization.

[0843] Radioactively labeled hybridization probes are generated by first strand cDNA synthesis per the manufacturer's instructions (Life Technologies) from mRNA/RNA samples prepared from the specific tissue being analyzed. The hybridization probes are purified by gel exclusion chromatography, quantitated, and hybridized with the array filters in hybridization bottles at 65° C. overnight. The filters are washed under stringent conditions and signals are captured using a Fuji phosphorimager.

[0844] Data is extracted using AIS software and following background subtraction, signal normalization is performed. This includes a normalization of filter-wide expression levels between different experimental runs. Genes that are differentially expressed in the tissue of interest are identified and the full length sequence of these clones is generated.

### Example 4

### Chromosomal Mapping of the Polynucleotides

[0845] An oligonucleotide primer set is designed according to the sequence at the 5′ end of SEQ ID NO:X. This primer preferably spans about 100 nucleotides. This primer set is then used in a polymerase chain reaction under the following set of conditions : 30 seconds, 95° C.; 1 minute, 56° C.; 1 minute, 70° C. This cycle is repeated 32 times followed by one 5 minute cycle at 70° C. Human, mouse, and hamster DNA is used as template in addition to a somatic cell hybrid panel containing individual chromosomes or chromosome fragments (Bios, Inc). The reactions is analyzed on either 8% polyacrylamide gels or 3.5 % agarose gels. Chromosome mapping is determined by the presence of an approximately 100 bp PCR fragment in the particular somatic cell hybrid.

### Example 5

### Bacterial Expression of a Polypeptide

[0846] A polynucleotide encoding a polypeptide of the present invention is amplified using PCR oligonucleotide primers corresponding to the 5′ and 3′ ends of the DNA sequence, as outlined in Example 1, to synthesize insertion fragments. The primers used to amplify the cDNA insert should preferably contain restriction sites, such as BamJI and XbaI, at the 5′ end of the primers in order to clone the amplified product into the expression vector. For example, BamHI and XbaI correspond to the restriction enzyme sites on the bacterial expression vector pQE-9. (Qiagen, Inc., Chatsworth, Calif.). This plasmid vector encodes antibiotic resistance (Amp^{r}), a bacterial origin of replication (ori), an IPTG-regulatable promoter/operator (P/O), a ribosome binding site (RBS), a 6-histidine tag (6-His), and restriction enzyme cloning sites.

[0847] The pQE-9 vector is digested with BamHI and XbaI and the amplified fragment is ligated into the pQE-9 vector maintaining the reading frame initiated at the bacterial RBS. The ligation mixture is then used to transform the E. coli strain M15/rep4 (Qiagen, Inc.) which contains multiple copies of the plasmid pREP4, which expresses the lacI repressor and also confers kanamycin resistance (Kan^{r}). Transformants are identified by their ability to grow on LB plates and ampicillin/kanamycin resistant colonies are selected. Plasmid DNA is isolated and confirmed by restriction analysis.

[0848] Clones containing the desired constructs are grown overnight (O/N) in liquid culture in LB media supplemented with both Amp (100 ug/ml) and Kan (25 ug/ml). The OIN culture is used to inoculate a large culture at a ratio of 1:100 to 1:250. The cells are grown to an optical density 600 (O.D.⁶⁰⁰) of between 0.4 and 0.6. IPTG (Isopropyl-B-D-thiogalacto pyranoside) is then added to a final concentration of 1 mM. IPTG induces by inactivating the lacI repressor, clearing the P/O leading to increased gene expression.

[0849] Cells are grown for an extra 3 to 4 hours. Cells are then harvested by centrifugation (20 mins at 6000×g). The cell pellet is solubilized in the chaotropic agent 6 Molar Guanidine HCl by stirring for 3-4 hours at 4° C. The cell debris is removed by centrifugation, and the supernatant containing the polypeptide is loaded onto a nickel-nitrilo-tri-acetic acid (“Ni-NTA”) affinity resin column (available from QIAGEN, Inc., supra). Proteins with a 6 x His tag bind to the Ni-NTA resin with high affinity and can be purified in a simple one-step procedure (for details see: The QlAexpressionist (1995) QIAGEN, Inc., supra).

[0850] Briefly, the supernatant is loaded onto the column in 6 M guanidine-HCl, pH 8, the column is first washed with 10 volumes of 6 M guanidine-HCI, pH 8, then washed with 10 volumes of 6 M guanidine-HCI pH 6, and finally the polypeptide is eluted with 6 M guanidine-HCl, pH 5.

[0851] The purified protein is then renatured by dialyzing it against phosphate-buffered saline (PBS) or 50 mM Na-acetate, pH 6 buffer plus 200 mM NaCl. Alternatively, the protein can be successfully refolded while immobilized on the Ni-NTA column. The recommended conditions are as follows: renature using a linear 6M-1M urea gradient in 500 mM NaCl, 20% glycerol, 20 mM Tris/HCl pH 7.4, containing protease inhibitors. The renaturation should be performed over a period of 1.5 hours or more. After renaturation the proteins are eluted by the addition of 250 mM immidazole. Immidazole is removed by a final dialyzing step against PBS or 50 mM sodium acetate pH 6 buffer plus 200 mM NaCl. The purified protein is stored at 4° C. or frozen at −80° C.

[0852] In addition to the above expression vector, the present invention further includes an expression vector comprising phage operator and promoter elements operatively linked to a polynucleotide of the present invention, called pHE4a. (ATCC Accession Number 209645, deposited on Feb. 25, 1998.) This vector contains: 1) a neomycinphosphotransferase gene as a selection marker, 2) an E. coli origin of replication, 3) a T5 phage promoter sequence, 4) two lac operator sequences, 5) a Shine-Delgarno sequence, and 6) the lactose operon repressor gene (laclq). The origin of replication (oriC) is derived from pUC19 (LTI, Gaithersburg, Md.). The promoter sequence and operator sequences are made synthetically.

[0853] DNA can be inserted into the pHEa by restricting the vector with NdeI and XbaI, BamHI, XhoI, or Asp718, running the restricted product on a gel, and isolating the larger fragment (the stuffer fragment should be about 310 base pairs). The DNA insert is generated according to the PCR protocol described in Example 1, using PCR primers having restriction sites for NdeI (5′ primer) and XbaI, BamHI, XhoI, or Asp718 (3′ primer). The PCR insert is gel purified and restricted with compatible enzymes. The insert and vector are ligated according to standard protocols.

[0854] The engineered vector could easily be substituted in the above protocol to express protein in a bacterial system.

### Example 6

### Puriflcation of a Polypeptidefrom an Inclusion Body

[0855] The following alternative method can be used to purify a polypeptide expressed in E coli when it is present in the form of inclusion bodies. Unless otherwise specified, all of the following steps are conducted at 4-10° C.

[0856] Upon completion of the production phase of the E. coli fermentation, the cell culture is cooled to 4-10° C. and the cells harvested by continuous centrifugation at 15,000 rpm (Heraeus Sepatech). On the basis of the expected yield of protein per unit weight of cell paste and the amount of purified protein required, an appropriate amount of cell paste, by weight, is suspended in a buffer solution containing 100 mM Tris, 50 mM EDTA, pH 7.4. The cells are dispersed to a homogeneous suspension using a high shear mixer.

[0857] The cells are then lysed by passing the solution through a microfluidizer (Microfuidics, Corp. or APV Gaulin, Inc.) twice at 4000-6000 psi. The homogenate is then mixed with NaCl solution to a final concentration of 0.5 M NaCl, followed by centrifugation at 7000×g for 15 min. The resultant pellet is washed again using O.5M NaCl, 100 mM Tris, 50 mM EDTA, pH 7.4.

[0858] The resulting washed inclusion bodies are solubilized with 1.5 M guanidine hydrochloride (GuHCI) for 2-4 hours. After 7000×g centrifugation for 15 min., the pellet is discarded and the polypeptide containing supernatant is incubated at 4° C. overnight to allow further GuHCl extraction.

[0859] Following high speed centrifugation (30,000×g) to remove insoluble particles, the GuHCI solubilized protein is refolded by quickly mixing the GuHCl extract with 20 volumes of buffer containing 50 mM sodium, pH 4.5, 150 mM NaCl, 2 mM EDTA by vigorous stirring. The refolded diluted protein solution is kept at 4° C. without mixing for 12 hours prior to further purification steps.

[0860] To clarify the refolded polypeptide solution, a previously prepared tangential filtration unit equipped with 0.16 μm membrane filter with appropriate surface area (e.g., Filtron), equilibrated with 40 mM sodium acetate, pH 6.0 is employed. The filtered sample is loaded onto a cation exchange resin (e.g., Poros HS-50, Perseptive Biosystems). The column is washed with 40 mM sodium acetate, pH 6.0 and eluted with 250 mM, 500 mM, 1000 mM, and 1500 mM NaCl in the same buffer, in a stepwise manner. The absorbance at 280 nm of the effluent is continuously monitored. Fractions are collected and further analyzed by SDS-PAGE.

[0861] Fractions containing the polypeptide are then pooled and mixed with 4 volumes of water. The diluted sample is then loaded onto a previously prepared set of tandem columns of strong anion (Poros HQ-50, Perseptive Biosystems) and weak anion (Poros CM-20, Perseptive Biosystems) exchange resins. The columns are equilibrated with 40 mM sodium acetate, pH 6.0. Both columns are washed with 40 mM sodium acetate, pH 6.0, 200 mM NaCl. The CM-20 column is then eluted using a 10 column volume linear gradient ranging from 0.2 M NaCl, 50 mM sodium acetate, pH 6.0 to 1.0 M NaCl, 50 mM sodium acetate, pH 6.5. Fractions are collected under constant A₂₈₀ monitoring of the effluent. Fractions containing the polypeptide (determined, for instance, by 16% SDS-PAGE) are then pooled.

[0862] The resultant polypeptide should exhibit greater than 95% purity after the above refolding and purification steps. No major contaminant bands should be observed from Commassie blue stained 16% SDS-PAGE gel when 5 μg of purified protein is loaded. The purified protein can also be tested for endotoxin/LPS contamination, and typically the LPS content is less than 0.1 ng/ml according to LAL assays.

### Example 7

### Cloning and Expression of a Polypeptide in a Baculovirus Expression System

[0863] In this example, the plasmid shuttle vector pA2 is used to insert a polynucleotide into a baculovirus to express a polypeptide. This expression vector contains the strong polyhedrin promoter of the Autographa californica nuclear polyhedrosis virus (AcMNPV) followed by convenient restriction sites such as BamHI, Xba I and Asp7l8. The polyadenylation site of the simian virus 40 (“SV40”) is used for efficient polyadenylation. For easy selection of recombinant virus, the plasmid contains the beta-galactosidase gene from E. coli under control of a weak Drosophila promoter in the same orientation, followed by the polyadenylation signal of the polyhedrin gene. The inserted genes are flanked on both sides by viral sequences for cell-mediated homologous recombination with wild-type viral DNA to generate a viable virus that express the cloned polynucleotide.

[0864] Many other baculovirus vectors can be used in place of the vector above, such as pAc373, pVL941, and pAcIM1, as one skilled in the art would readily appreciate, as long as the construct provides appropriately located signals for transcription, translation, secretion and the like, including a signal peptide and an in-frame AUG as required. Such vectors are described, for instance, in Luckow et al., Virology 170:31-39 (1989).

[0865] Specifically, the cDNA sequence contained in the deposited clone, including the AUG initiation codon, is amplified using the PCR protocol described in Example 1. If a naturally occurring signal sequence is used to produce the polypeptide of the present invention, the pA2 vector does not need a second signal peptide. Alternatively, the vector can be modified (pA2 GP) to include a baculovirus leader sequence, using the standard methods described in Summers et al., “A Manual of Methods for Baculovirus Vectors and Insect Cell Culture Procedures,” Texas Agricultural Experimental Station Bulletin No. 1555 (1987).

[0866] The amplified fragment is isolated from a 1% agarose gel using a commercially available kit (“Geneclean,” BIO 101 Inc., La Jolla, Calif.). The fragment then is digested with appropriate restriction enzymes and again purified on a 1% agarose gel.

[0867] The plasmid is digested with the corresponding restriction enzymes and optionally, can be dephosphorylated using calf intestinal phosphatase, using routine procedures known in the art. The DNA is then isolated from a 1% agarose gel using a commercially available kit (“Geneclean” BIO 101 Inc., La Jolla, Calif.).

[0868] The fragment and the dephosphorylated plasmid are ligated together with T4 DNA ligase. E. coli HB101 or other suitable E. coli hosts such as XL-1 Blue (Stratagene Cloning Systems, La Jolla, Calif.) cells are transformed with the ligation mixture and spread on culture plates. Bacteria containing the plasmid are identified by digesting DNA from individual colonies and analyzing the digestion product by gel electrophoresis. The sequence of the cloned fragment is confirmed by DNA sequencing.

[0869] Five μg of a plasmid containing the polynucleotide is co-transfected with 1.0 μg of a commercially available linearized baculovirus DNA (“BaculoGold™ baculovirus DNA”, Pharmingen, San Diego, Calif.), using the lipofection method described by Felgner et al., Proc. Natl. Acad. Sci. USA 84:7413-7417 (1987). One μg of BaculoGold™ virus DNA and 5 μg of the plasmid are mixed in a sterile well of a microtiter plate containing 50 μl of serum-free Grace's medium (Life Technologies Inc., Gaithersburg, Md.). Afterwards, 10 μl Lipofectin plus 90 μl Grace's medium are added, mixed and incubated for 15 minutes at room temperature. Then the transfection mixture is added drop-wise to Sf9 insect cells (ATCC CRL 1711) seeded in a 35 mm tissue culture plate with 1 ml Grace's medium without serum. The plate is then incubated for 5 hours at 27° C. The transfection solution is then removed from the plate and 1 ml of Grace's insect medium supplemented with 10% fetal calf serum is added. Cultivation is then continued at 27° C. for four days.

[0870] After four days the supernatant is collected and a plaque assay is performed, as described by Summers and Smith, supra. An agarose gel with “Blue Gal” (Life Technologies Inc., Gaithersburg) is used to allow easy identification and isolation of gal-expressing clones, which produce blue-stained plaques. (A detailed description of a “plaque assay” of this type can also be found in the user's guide for insect cell culture and baculovirology distributed by Life Technologies Inc., Gaithersburg, page 9-10.) After appropriate incubation, blue stained plaques are picked with the tip of a micropipettor (e.g., Eppendorf). The agar containing the recombinant viruses is then resuspended in a microcentrifuge tube containing 200 μl of Grace's medium and the suspension containing the recombinant baculovirus is used to infect Sf9 cells seeded in 35 mm dishes. Four days later the supernatants of these culture dishes are harvested and then they are stored at 4° C.

[0871] To verify the expression of the polypeptide, Sf9 cells are grown in Grace's medium supplemented with 10% heat-inactivated FBS. The cells are infected with the recombinant baculovirus containing the polynucleotide at a multiplicity of infection (“MOI”) of about 2. If radiolabeled proteins are desired, 6 hours later the medium is removed and is replaced with SF900 II medium minus methionine and cysteine (available from Life Technologies Inc., Rockville, Md.). After 42 hours, 5 μCi of ³⁵S-methionine and 5 μCi ³⁵S-cysteine (available from Amersham) are added. The cells are further incubated for 16 hours and then are harvested by centrifugation. The proteins in the supernatant as well as the intracellular proteins are analyzed by SDS-PAGE followed by autoradiography (if radiolabeled).

[0872] Microsequencing of the amino acid sequence of the amino terminus of purified protein may be used to determine the amino terminal sequence of the produced protein.

### Example 8

### Expression of a Polypeptide in Mammalian Cells

[0873] The polypeptide of the present invention can be expressed in a mammalian cell. A typical mammalian expression vector contains a promoter element, which mediates the initiation of transcription of mRNA, a protein coding sequence, and signals required for the termination of transcription and polyadenylation of the transcript. Additional elements include enhancers, Kozak sequences and intervening sequences flanked by donor and acceptor sites for RNA splicing. Highly efficient transcription is achieved with the early and late promoters from SV40, the long terminal repeats (LTRs) from Retroviruses, e.g., RSV, HTLVI, HIVI and the early promoter of the cytomegalovirus (CMV). However, cellular elements can also be used (e.g., the human actin promoter).

[0874] Suitable expression vectors for use in practicing the present invention include, for example, vectors such as pSVL and pMSG (Pharmacia, Uppsala, Sweden), pRSVcat (ATCC 37152), pSV2dhfr (ATCC 37146), pBC12MI (ATCC 67109), pCMVSport 2.0, and pCMVSport 3.0. Mammalian host cells that could be used include, human Hela, 293, H9 and Jurkat cells, mouse NIH3T3 and C127 cells, Cos 1, Cos 7 and CV1, quail QC1-3 cells, mouse L cells and Chinese hamster ovary (CHO) cells.

[0875] Alternatively, the polypeptide can be expressed in stable cell lines containing the polynucleotide integrated into a chromosome. The co-transfection with a selectable marker such as DHFR, gpt, neomycin, hygromycin allows the identification and isolation of the transfected cells.

[0876] The transfected gene can also be amplified to express large amounts of the encoded protein. The DHFR (dihydrofolate reductase) marker is useful in developing cell lines that carry several hundred or even several thousand copies of the gene of interest. (See, e.g., Alt, F. W., et al., J. Biol. Chem. 253:1357-1370 (1978); Hamlin, J. L. and Ma, C., Biochem. et Biophys. Acta, 1097:107-143 (1990); Page, M. J. and Sydenham, M. A., Biotechnology 9:64-68 (1991).) Another useful selection marker is the enzyme glutamine synthase (GS) (Murphy et al., Biochem J. 227:277-279 (1991); Bebbington et al., Bio/Technology 10:169-175 (1992). Using these markers, the mammalian cells are grown in selective medium and the cells with the highest resistance are selected. These cell lines contain the amplified gene(s) integrated into a chromosome. Chinese hamster ovary (CHO) and NSO cells are often used for the production of proteins.

[0877] Derivatives of the plasmid pSV2-dhfr (ATCC Accession No. 37146), the expression vectors pC4 (ATCC Accession No. 209646) and pC6 (ATCC Accession No.209647) contain the strong promoter (LTR) of the Rous Sarcoma Virus (Cullen et al., Molecular and Cellular Biology, 438-447 (March, 1985)) plus a fragment of the CMV-enhancer (Boshart et al., Cell 41:521-530 (1985).) Multiple cloning sites, e.g., with the restriction enzyme cleavage sites BamHI, XbaI and Asp718, facilitate the cloning of the gene of interest. The vectors also contain the 3′ intron, the polyadenylation and termination signal of the rat preproinsulin gene, and the mouse DHFR gene under control of the SV40 early promoter.

[0878] Specifically, the plasmid pC6, for example, is digested with appropriate restriction enzymes and then dephosphorylated using calf intestinal phosphates by procedures known in the art. The vector is then isolated from a 1 % agarose gel.

[0879] A polynucleotide of the present invention is amplified according to the protocol outlined in Example 1. If a naturally occurring signal sequence is used to produce the polypeptide of the present invention, the vector does not need a second signal peptide. Alternatively, if a naturally occurring signal sequence is not used, the vector can be modified to include a heterologous signal sequence. (See, e.g., WO 96/34891.)

[0880] The amplified fragment is isolated from a 1% agarose gel using a commercially available kit (“Geneclean,” BIO 101 Inc., La Jolla, Calif.). The fragment then is digested with appropriate restriction enzymes and again purified on a 1% agarose gel.

[0881] The amplified fragment is then digested with the same restriction enzyme and purified on a 1% agarose gel. The isolated fragment and the dephosphorylated vector are then ligated with T4 DNA ligase. E. coli HB101 or XL-1 Blue cells are then transformed and bacteria are identified that contain the fragment inserted into plasmid pC6 using, for instance, restriction enzyme analysis.

[0882] Chinese hamster ovary cells lacking an active DHFR gene is used for transfection. Five μg of the expression plasmid pC6 or pC4 is cotransfected with 0.5 μg of the plasmid pSVneo using lipofectin (Felgner et al., supra). The plasmid pSV2-neo contains a dominant selectable marker, the neo gene from Tn5 encoding an enzyme that confers resistance to a group of antibiotics including G418. The cells are seeded in alpha minus MEM supplemented with 1 mg/ml G418. After 2 days, the cells are trypsinized and seeded in hybridoma cloning plates (Greiner, Germany) in alpha minus MEM supplemented with 10, 25, or 50 ng/ml of metothrexate plus 1 mg/ml G418. After about 10-14 days single clones are trypsinized and then seeded in 6-well petri dishes or 10 ml flasks using different concentrations of methotrexate (50 nM, 100 nM, 200 nM, 400 nM, 800 nM). Clones growing at the highest concentrations of methotrexate are then transferred to new 6-well plates containing even higher concentrations of methotrexate (I μM, 2 μM, 5 μM, 10 mM, 20 mM). The same procedure is repeated until clones are obtained which grow at a concentration of 100 - 200 μM. Expression of the desired gene product is analyzed, for instance, by SDS-PAGE and Western blot or by reversed phase HPLC analysis.

### Example 9

### Protein Fusions

[0883] The polypeptides of the present invention are preferably fused to other proteins. These fusion proteins can be used for a variety of applications. For example, fusion of the present polypeptides to His-tag, HA-tag, protein A, IgG domains, and maltose binding protein facilitates purification. (See Example 5; see also EP A 394,827; Traunecker, et al., Nature 331:84-86 (1988).) Similarly, fusion to IgG-1, IgG-3, and albumin increases the halflife time in vivo. Nuclear localization signals fused to the polypeptides of the present invention can target the protein to a specific subcellular localization, while covalent heterodimer or homodimers can increase or decrease the activity of a fusion protein. Fusion proteins can also create chimeric molecules having more than one function. Finally, fusion proteins can increase solubility and/or stability of the fused protein compared to the non-fused protein. All of the types of fusion proteins described above can be made by modifying the following protocol, which outlines the fusion of a polypeptide to an IgG molecule, or the protocol described in Example 5.

[0884] Briefly, the human Fc portion of the IgG molecule can be PCR amplified, using primers that span the 5′ and 3′ ends of the sequence described below. These primers also should have convenient restriction enzyme sites that will facilitate cloning into an expression vector, preferably a mammalian expression vector.

[0885] For example, if pC4 (Accession No. 209646) is used, the human Fc portion can be ligated into the BamHi cloning site. Note that the 3′ BamHI site should be destroyed. Next, the vector containing the human Fc portion is re-restricted with BarnHI, linearizing the vector, and a polynucleotide of the present invention, isolated by the PCR protocol described in Example 1, is ligated into this BamHI site. Note that the polynucleotide is cloned without a stop codon, otherwise a fusion protein will not be produced.

[0886] If the naturally occurring signal sequence is used to produce the polypeptide of the present invention, pC4 does not need a second signal peptide. Alternatively, if the naturally occurring signal sequence is not used, the vector can be modified to include a heterologous signal sequence. (See, e.g., WO 96/34891.)

[0887] Human IgG Fc region:

[0888] GGGATCCGGAGCCCAAATCTTCTGACAAAACTCACACATGCCCACCGTGCCCA GCACCTGAATTCGAGGGTGCACCGTCAGTCTTCCTCTTCCCCCCAAAACCCAA GGACACCCTCATGATCTCCCGGACTCCTGAGGTCACATGCGTGGTGGTGGACG TAAGCCACGAAGACCCTGAGGTCAAGTTCAACTGGTACGTGGACGGCGTGGA GGTGCATAATGCCAAGACAAAGCCGCGGGAGGAGCAGTACAACAGCACGTAC CGTGTGGTCAGCGTCCTCACCGTCCTGCACCAGGACTGGCTGAATGGCAAGGA GTACAAGTGCAAGGTCTCCAACAAAGCCCTCCCAACCCCCATCGAGAAAACC ATCTCCAAAGCCAAAGGGCAGCCCCGAGAACCACAGGTGTACACCCTGCCCC CATCCCGGGATGAGCTGACCAAGAACCAGGTCAGCCTGACCTGCCTGGTCAA AGGCTTCTATCCAAGCGACATCGCCGTGGAGTGGGAGAGCAATGGGCAGCCG GAGAACAACTACAAGACCACGCCTCCCGTGCTGGACTCCGACGGCTCCTTCTT CCTCTACAGCAAGCTCACCGTGGACAAGAGCAGGTGGCAGCAGGGGAACGTC TTCTCATGCTCCGTGATGCATGAGGCTCTGCACAACCACTACACGCAGAAGAG CCTCTCCCTGTCTCCGGGTAAATGAGTGCGACGGCCGCGACTCTAGAGGAT (SEQ ID NO:1547)

### Example 10

### Production of an Antibody from a Polypeptide

[0889] a) Hybridoma Technology

[0890] The antibodies of the present invention can be prepared by a variety of methods. (See, Current Protocols, Chapter 2.) As one example of such methods, cells expressing polypeptide of the present invention are administered to an animal to induce the production of sera containing polyclonal antibodies. In a preferred method, a preparation of polypeptide of the present invention is prepared and purified to render it substantially free of natural contaminants. Such a preparation is then introduced into an animal in order to produce polyclonal antisera of greater specific activity.

[0891] Monoclonal antibodies specific for polypeptide of the present invention are prepared using hybridoma technology. (Kohler et al., Nature 256:495 (1975); Kohler et al., Eur. J. Immunol. 6:511 (1976); Kohler et al., Eur. J. Immunol. 6:292 (1976); Hammerling et al., in: Monoclonal Antibodies and T-Cell Hybridomas, Elsevier, N.Y., pp. 563-681 (1981)). In general, an animal (preferably a mouse) is immunized with polypeptide of the present invention or, more preferably, with a secreted polypeptide of the present invention-expressing cell. Such polypeptide-expressing cells are cultured in any suitable tissue culture medium, preferably in Earle's modified Eagle's medium supplemented with 10% fetal bovine serum (inactivated at about 56° C), and supplemented with about 10 g/l of nonessential amino acids, about 1,000 U/ml of penicillin, and about 100 μg/ml of streptomycin.

[0892] The splenocytes of such mice are extracted and fused with a suitable myeloma cell line. Any suitable myeloma cell line may be employed in accordance with the present invention; however, it is preferable to employ the parent myeloma cell line (SP20), available from the ATCC. After fusion, the resulting hybridoma cells are selectively maintained in HAT medium, and then cloned by limiting dilution as described by Wands et al. (Gastroenterology 80:225-232 (1981)). The hybridoma cells obtained through such a selection are then assayed to identify clones which secrete antibodies capable of binding the polypeptide of the present invention.

[0893] Alternatively, additional antibodies capable of binding to polypeptide of the present invention can be produced in a two-step procedure using anti-idiotypic antibodies. Such a method makes use of the fact that antibodies are themselves antigens, and therefore, it is possible to obtain an antibody which binds to a second antibody. In accordance with this method, protein specific antibodies are used to immunize an animal, preferably a mouse. The splenocytes of such an animal are then used to produce hybridoma cells, and the hybridoma cells are screened to identify clones which produce an antibody whose ability to bind to the polypeptide of the present invention-specific antibody can be blocked by polypeptide of the present invention. Such antibodies comprise anti-idiotypic antibodies to the polypeptide of the present invention-specific antibody and are used to immunize an animal to induce formation of further polypeptide of the present invention-specific antibodies.

[0894] For in vivo use of antibodies in humans, an antibody is “humanized”. Such antibodies can be produced using genetic constructs derived from hybridoma cells producing the monoclonal antibodies described above. Methods for producing chimeric and humanized antibodies are known in the art and are discussed herein. (See, for review, Morrison, Science 229:1202 (1985); Oi et al., BioTechniques 4:214 (1986); Cabilly et al., U.S. Pat. No. 4,816,567; Taniguchi et al., EP 171496; Morrison et al., EP 173494; Neuberger et al., WO 8601533; Robinson et al., WO 8702671; Boulianne et al., Nature 312:643 (1984); Neuberger et al., Nature 314:268 (1985).)

[0895] b) Isolation Of Antibody Fragments Directed Against Polypeptide of the Present Invention From A Library Of scFvs

[0896] Naturally occurring V-genes isolated from human PBLs are constructed into a library of antibody fragments which contain reactivities against polypeptide of the present invention to which the donor may or may not have been exposed (see e.g., U.S. Pat. No. 5,885,793 incorporated herein by reference in its entirety).

[0897] Rescue of the Library. A library of scFvs is constructed from the RNA of human PBLs as described in PCT publication WO 92/01047. To rescue phage displaying antibody fragments, approximately 109 E. coli harboring the phagemid are used to inoculate 50 ml of 2×TY containing 1% glucose and 100 μg/ml of ampicillin (2×TY-AMP-GLU) and grown to an O.D. of 0.8 with shaking. Five ml of this culture is used to innoculate 50 ml of 2×TY-AMP-GLU, 2×108 TU of delta gene 3 helper (M13 delta gene III, see PCT publication WO 92/01047) are added and the culture incubated at 37° C. for 45 minutes without shaking and then at 37° C. for 45 minutes with shaking. The culture is centrifuged at 4000 r.p.m. for 10 min. and the pellet resuspended in 2 liters of 2xTY containing 100 μg/ml ampicillin and 50 ug/ml kanamycin and grown overnight. Phage are prepared as described in PCT publication WO 92/01047.

[0898] M13 delta gene III is prepared as follows: M13 delta gene III helper phage does not encode gene III protein, hence the phage(mid) displaying antibody fragments have a greater avidity of binding to antigen. Infectious M13 delta gene III particles are made by growing the helper phage in cells harboring a pUC19 derivative supplying the wild type gene III protein during phage morphogenesis. The culture is incubated for 1 hour at 37° C. without shaking and then for a further hour at 37° C. with shaking. Cells are spun down (IEC-Centra 8,400 r.p.m. for 10 min), resuspended in 300 ml 2xTY broth containing 100 μg ampicillin/ml and 25 μg kanamycin/ml (2×TY-AMP-KAN) and grown overnight, shaking at 37° C. Phage particles are purified and concentrated from the culture medium by two PEG-precipitations (Sambrook et al., 1990), resuspended in 2 ml PBS and passed through a 0.45 μm filter (Minisart NML; Sartorius) to give a final concentration of approximately 1013 transducing units/ml (ampicillin-resistant clones).

[0899] Panning of the Library. Immunotubes (Nunc) are coated overnight in PBS with 4 ml of either 100 μg/ml or 10 μg/ml of a polypeptide of the present invention. Tubes are blocked with 2% Marvel-PBS for 2 hours at 37° C. and then washed 3 times in PBS. Approximately 1013 TU of phage is applied to the tube and incubated for 30 minutes at room temperature tumbling on an over and under turntable and then left to stand for another 1.5 hours. Tubes are washed 10 times with PBS 0.1% Tween-20 and 10 times with PBS. Phage are eluted by adding 1 ml of 100 mM triethylamine and rotating 15 minutes on an under and over turntable after which the solution is immediately neutralized with 0.5 ml of 1.OM Tris-HCl, pH 7.4. Phage are then used to infect 10 ml of mid-log E. coli TG1 by incubating eluted phage with bacteria for 30 minutes at 37° C. The E. coli are then plated on TYE plates containing 1% glucose and 100 μg/ml ampicillin. The resulting bacterial library is then rescued with delta gene 3 helper phage as described above to prepare phage for a subsequent round of selection. This process is then repeated for a total of 4 rounds of affinity purification with tube-washing increased to 20 times with PBS, 0.1% Tween-20 and 20 times with PBS for rounds 3 and 4.

[0900] Characterization of Binders. Eluted phage from the 3rd and 4th rounds of selection are used to infect E. coli HB 2151 and soluble scFv is produced (Marks, et al., 1991) from single colonies for assay. ELISAs are performed with microtitre plates coated with either 10 pg/mil of the polypeptide of the present invention in 50 mM bicarbonate pH 9.6. Clones positive in ELISA are further characterized by PCR fingerprinting (see, e.g., PCT publication WO 92/01047) and then by sequencing. These ELISA positive clones may also be further characterized by techniques known in the art, such as, for example, epitope mapping, binding affinity, receptor signal transduction, ability to block or competitively inhibit antibody/antigen binding, and competitive agonistic or antagonistic activity.

### Example 11

### Method of Determining Alterations in a Gene Corresponding to a Polynucleotide

[0901] RNA isolated from entire families or individual patients presenting with a phenotype of interest (such as a disease) is be isolated. cDNA is then generated from these RNA samples using protocols known in the art. (See, Sambrook.) The cDNA is then used as a template for PCR, employing primers surrounding regions of interest in SEQ ID NO:X; and/or the nucleotide sequence of the related cDNA in the cDNA clone contained in a deposited library. Suggested PCR conditions consist of 35 cycles at 95 degrees C. for 30 seconds; 60-120 seconds at 52-58 degrees C; and 60-120 seconds at 70 degrees C., using buffer solutions described in Sidransky et al., Science 252:706 (1991).

[0902] PCR products are then sequenced using primers labeled at their 5′ end with T4 polynucleotide kinase, employing SequiTherm Polymerase. (Epicentre Technologies). The intron-exon borders of selected exons is also determined and genomic PCR products analyzed to confirm the results. PCR products harboring suspected mutations is then cloned and sequenced to validate the results of the direct sequencing.

[0903] PCR products is cloned into T-tailed vectors as described in Holton et al., Nucleic Acids Research, 19:1156 (1991) and sequenced with T7 polymerase (United States Biochemical). Affected individuals are identified by mutations not present in unaffected individuals.

[0904] Genomic rearrangements are also observed as a method of determining alterations in a gene corresponding to a polynucleotide. Genomic clones isolated according to Example 2 are nick-translated with digoxigenindeoxy-uridine 5′-triphosphate (Boehringer Manheim), and FISH performed as described in Johnson et al., Methods Cell Biol. 35:73-99 (1991). Hybridization with the labeled probe is carried out using a vast excess of human cot-1 DNA for specific hybridization to the corresponding genomic locus.

[0905] Chromosomes are counterstained with 4,6-diamino-2-phenylidole and propidium iodide, producing a combination of C- and R-bands. Aligned images for precise mapping are obtained using a triple-band filter set (Chroma Technology, Brattleboro, Vt.) in combination with a cooled charge-coupled device camera (Photometrics, Tucson, Ariz.) and variable excitation wavelength filters. (Johnson et al., Genet. Anal. Tech. Appl., 8:75 (1991).) Image collection, analysis and chromosomal fractional length measurements are performed using the ISee Graphical Program System. (Inovision Corporation, Durham, N.C.) Chromosome alterations of the genomic region hybridized by the probe are identified as insertions, deletions, and translocations. These alterations are used as a diagnostic marker for an associated disease.

### Example 12

### Method of Detecting Abnornal Levels of a Polypeptide in a Biological Sample

[0906] A polypeptide of the present invention can be detected in a biological sample, and if an increased or decreased level of the polypeptide is detected, this polypeptide is a marker for a particular phenotype. Methods of detection are numerous, and thus, it is understood that one skilled in the art can modify the following assay to fit their particular needs.

[0907] For example, antibody-sandwich ELISAs are used to detect polypeptides in a sample, preferably a biological sample. Wells of a microtiter plate are coated with specific antibodies, at a final concentration of 0.2 to 10 ug/ml. The antibodies are either monoclonal or polyclonal and are produced by the method described in Example 10. The wells are blocked so that non-specific binding of the polypeptide to the well is reduced.

[0908] The coated wells are then incubated for >2 hours at RT with a sample containing the polypeptide. Preferably, serial dilutions of the sample should be used to validate results. The plates are then washed three times with deionized or distilled water to remove unbounded polypeptide.

[0909] Next, 50 ul of specific antibody-alkaline phosphatase conjugate, at a concentration of 25-400 ng, is added and incubated for 2 hours at room temperature. The plates are again washed three times with deionized or distilled water to remove unbounded conjugate.

[0910] Add 75 ul of 4-methylumbelliferyl phosphate (MUP) or p-nitrophenyl phosphate (NPP) substrate solution to each well and incubate 1 hour at room temperature. Measure the reaction by a microtiter plate reader. Prepare a standard curve, using serial dilutions of a control sample, and plot polypeptide concentration on the X-axis (log scale) and fluorescence or absorbance of the Y-axis (linear scale). Interpolate the concentration of the polypeptide in the sample using the standard curve.

### Example 13

### Formulation

[0911] The invention also provides methods of treatment and/or prevention of diseases or disorders (such as, for example, any one or more of the diseases or disorders disclosed herein) by administration to a subject of an effective amount of a Therapeutic. By therapeutic is meant a polynucleotides or polypeptides of the invention (including fragments and variants), agonists or antagonists thereof, and/or antibodies thereto, in combination with a pharmaceutically acceptable carrier type (e.g., a sterile carrier).

[0912] The Therapeutic will be formulated and dosed in a fashion consistent with good medical practice, taking into account the clinical condition of the individual patient (especially the side effects of treatment with the Therapeutic alone), the site of delivery, the method of administration, the scheduling of administration, and other factors known to practitioners. The “effective amount” for purposes herein is thus determined by such considerations.

[0913] As a general proposition, the total pharmaceutically effective amount of the Therapeutic administered parenterally per dose will be in the range of about 1 ug/kg/day to 10 mg/kg/day of patient body weight, although, as noted above, this will be subject to therapeutic discretion. More preferably, this dose is at least 0.01 mg/kg/day, and most preferably for humans between about 0.01 and 1 mg/kg/day for the hormone. If given continuously, the Therapeutic is typically administered at a dose rate of about 1 ug/kg/hour to about 50 ug/kg/hour, either by 1-4 injections per day or by continuous subcutaneous infusions, for example, using a mini-pump. An intravenous bag solution may also be employed. The length of treatment needed to observe changes and the interval following treatment for responses to occur appears to vary depending on the desired effect.

[0914] Therapeutics can be are administered orally, rectally, parenterally, intracistemally, intravaginally, intraperitoneally, topically (as by powders, ointments, gels, drops or transdermal patch), bucally, or as an oral or nasal spray. “Pharmaceutically acceptable carrier” refers to a non-toxic solid, semisolid or liquid filler, diluent, encapsulating material or formulation auxiliary of any. The term “parenteral” as used herein refers to modes of administration which include intravenous, intramuscular, intraperitoneal, intrastemal, subcutaneous and intraarticular injection and infusion.

[0915] Therapeutics of the invention are also suitably administered by sustained-release systems. Suitable examples of sustained-release Therapeutics are administered orally, rectally, parenterally, intracistemally, intravaginally, intraperitoneally, topically (as by powders, ointments, gels, drops or transdermal patch), bucally, or as an oral or nasal spray. “Pharmaceutically acceptable carrier” refers to a non-toxic solid, semisolid or liquid filler, diluent, encapsulating material or formulation auxiliary of any type. The term “parenteral” as used herein refers to modes of administration which include intravenous, intramuscular, intraperitoneal, intrastemal, subcutaneous and intraarticular injection and infusion.

[0916] Therapeutics of the invention are also suitably administered by sustained-release systems. Suitable examples of sustained-release Therapeutics include suitable polymeric materials (such as, for example, semi-permeable polymer matrices in the form of shaped articles, e.g., films, or mirocapsules), suitable hydrophobic materials (for example as an emulsion in an acceptable oil) or ion exchange resins, and sparingly soluble derivatives (such as, for example, a sparingly soluble salt).

[0917] Sustained-release matrices include polylactides (U.S. Pat. No. 3,773,919, EP 58,481), copolymers of L-glutamic acid and gamma-ethyl-L-glutamate (Sidman et al., Biopolymers 22:547-556 (1983)), poly (2- hydroxyethyl methacrylate) (Langer et al., J. Biomed. Mater. Res. 15:167-277 (1981), and Langer, Chem. Tech. 12:98-105 (1982)), ethylene vinyl acetate (Langer et al., Id.) or poly-D- (−)-3-hydroxybutyric acid (EP 133,988).

[0918] Sustained-release Therapeutics also include liposomally entrapped Therapeutics of the invention (see generally, Langer, Science 249:1527-1533 (1990); Treat et al., in Liposomes in the Therapy of Infectious Disease and Cancer, Lopez-Berestein and Fidler (eds.), Liss, New York, pp. 317 -327 and 353-365 (1989)). Liposomes containing the Therapeutic are prepared by methods known per se: DE 3,218,121; Epstein et al., Proc. Natl. Acad. Sci. (USA) 82:3688-3692 (1985); Hwang et al., Proc. Natl. Acad. Sci.(USA) 77:4030-4034 (1980); EP 52,322; EP 36,676; EP 88,046; EP 143,949; EP 142,641; Japanese Pat. Appl. 83-118008; U.S. Pat. Nos. 4,485,045 and 4,544,545; and EP 102,324. Ordinarily, the liposomes are of the small (about 200-800 Angstroms) unilamellar type in which the lipid content is greater than about 30 mol. percent cholesterol, the selected proportion being adjusted for the optimal Therapeutic.

[0919] In yet an additional embodiment, the Therapeutics of the invention are delivered by way of a pump (see Langer, supra; Sefton, CRC Crit. Ref. Biomed. Eng. 14:201 (1987); Buchwald et al., Surgery 88:507 (1980); Saudek et al., N. Engl. J. Med. 321:574 (1989)).

[0920] Other controlled release systems are discussed in the review by Langer (Science 249:1527-1533 (1990)).

[0921] For parenteral administration, in one embodiment, the Therapeutic is formulated generally by mixing it at the desired degree of purity, in a unit dosage injectable form (solution, suspension, or emulsion), with a pharmaceutically acceptable carrier, i.e., one that is non-toxic to recipients at the dosages and concentrations employed and is compatible with other ingredients of the formulation. For example, the formulation preferably does not include oxidizing agents and other compounds that are known to be deleterious to the Therapeutic.

[0922] Generally, the formulations are prepared by contacting the Therapeutic uniformly and intimately with liquid carriers or finely divided solid carriers or both. Then, if necessary, the product is shaped into the desired formulation. Preferably the carrier is a parenteral carrier, more preferably a solution that is isotonic with the blood of the recipient. Examples of such carrier vehicles include water, saline, Ringer's solution, and dextrose solution. Non-aqueous vehicles such as fixed oils and ethyl oleate are also useful herein, as well as liposomes.

[0923] The carrier suitably contains minor amounts of additives such as substances that enhance isotonicity and chemical stability. Such materials are non-toxic to recipients at the dosages and concentrations employed, and include buffers such as phosphate, citrate, succinate, acetic acid, and other organic acids or their salts; antioxidants such as ascorbic acid; low molecular weight (less than about ten residues) polypeptides, e.g., polyarginine or tripeptides; proteins, such as serum albumin, gelatin, or immunoglobulins; hydrophilic polymers such as polyvinylpyrrolidone; amino acids, such as glycine, glutamic acid, aspartic acid, or arginine; monosaccharides, disaccharides, and other carbohydrates including cellulose or its derivatives, glucose, manose, or dextrins; chelating agents such as EDTA; sugar alcohols such as mannitol or sorbitol; counterions such as sodium; and/or nonionic surfactants such as polysorbates, poloxamers, or PEG.

[0924] The Therapeutic is typically formulated in such vehicles at a concentration of about 0.1 mg/ml to 100 mg/ml, preferably 1-10 mg/ml, at a pH of about 3 to 8. It will be understood that the use of certain of the foregoing excipients, carriers, or stabilizers will result in the formation of polypeptide salts.

[0925] Any pharmaceutical used for therapeutic administration can be sterile. Sterility is readily accomplished by filtration through sterile filtration membranes (e.g., 0.2 micron membranes). Therapeutics generally are placed into a container having a sterile access port, for example, an intravenous solution bag or vial having a stopper pierceable by a hypodermic injection needle.

[0926] Therapeutics ordinarily will be stored in unit or multi-dose containers, for example, sealed ampoules or vials, as an aqueous solution or as a lyophilized formulation for reconstitution. As an example of a lyophilized formulation, 10-ml vials are filled with 5 ml of sterile-filtered 1% (w/v) aqueous Therapeutic solution, and the resulting mixture is lyophilized. The infusion solution is prepared by reconstituting the lyophilized Therapeutic using bacteriostatic Water-for-Injection.

[0927] The invention also provides a pharmaceutical pack or kit comprising one or more containers filled with one or more of the ingredients of the Therapeutics of the invention. Associated with such container(s) can be a notice in the form prescribed by a governmental agency regulating the manufacture, use or sale of pharmaceuticals or biological products, which notice reflects approval by the agency of manufacture, use or sale for human administration. In addition, the Therapeutics may be employed in conjunction with other therapeutic compounds.

[0928] The Therapeutics of the invention may be administered alone or in combination with adjuvants. Adjuvants that may be administered with the Therapeutics of the invention include, but are not limited to, alum, alum plus deoxycholate (ImmunoAg), MTP-PE (Biocine Corp.), QS21 (Genentech, Inc.), BCG, and MPL. In a specific embodiment, Therapeutics of the invention are administered in combination with alum. In another specific embodiment, Therapeutics of the invention are administered in combination with QS-21. Further adjuvants that may be administered with the Therapeutics of the invention include, but are not limited to, Monophosphoryl lipid immunomodulator, AdjuVax lOOa, QS-21, QS-18, CRL1005, Aluminum salts, MF-59, and Virosomal adjuvant technology. Vaccines that may be administered with the Therapeutics of the invention include, but are not limited to, vaccines directed toward protection against MMR (measles, mumps, rubella), polio, varicella, tetanus/diptheria, hepatitis A, hepatitis B, haemophilus influenzae B, whooping cough, pneumonia, influenza, Lyme's Disease, rotavirus, cholera, yellow fever, Japanese encephalitis, poliomyelitis, rabies, typhoid fever, and pertussis. Combinations may be administered either concomitantly, e.g., as an admixture, separately but simultaneously or concurrently; or sequentially. This includes presentations in which the combined agents are administered together as a therapeutic mixture, and also procedures in which the combined agents are administered separately but simultaneously, e.g., as through separate intravenous lines into the same individual. Administration “in combination” further includes the separate administration of one of the compounds or agents given first, followed by the second.

[0929] The Therapeutics of the invention may be administered alone or in combination with other therapeutic agents. Therapeutic agents that may be administered in combination with the Therapeutics of the invention, include but not limited to, other members of the TNF family, chemotherapeutic agents, antibiotics, steroidal and non-steroidal anti-inflammatories, conventional immunotherapeutic agents, cytokines and/or growth factors. Combinations may be administered either concomitantly, e.g., as an admixture, separately but simultaneously or concurrently; or sequentially. This includes presentations in which the combined agents are administered together as a therapeutic mixture, and also procedures in which the combined agents are administered separately but simultaneously, e.g., as through separate intravenous lines into the same individual. Administration “in combination” further includes the separate administration of one of the compounds or agents given first, followed by the second.

[0930] In one embodiment, the Therapeutics of the invention are administered in combination with members of the TNF family. TNF, TNF-related or TNF-like molecules that may be administered with the Therapeutics of the invention include, but are not limited to, soluble forms of TNF-alpha, lymphotoxin-alpha (LT-alpha, also known as TNF-beta), LT-beta (found in complex heterotrimer LT-alpha2-beta), OPGL, FasL, CD27L, CD30L, CD40L, 4-lBBL, DcR3, OX40L, TNF-gamma (International Publication No. WO 96/14328), AIM-I (International Publication No. WO 97/33899), endokine-alpha (International Publication No. WO 98/07880), TR6 (International Publication No. WO 98/30694), OPG, and neutrokine-alpha (International Publication No. WO 98/18921, OX40, and nerve growth factor (NGF), and soluble forms of Fas, CD30, CD27, CD40 and 4-IBB, TR2 (International Publication No. WO 96/34095), DR3 (International Publication No. WO 97/33904), DR4 (International Publication No. WO 98/32856), TR5 (International Publication No. WO 98/30693), TR6 (International Publication No. WO 98/30694), TR7 (International Publication No. WO 98/41629), TRANK, TR9 (International Publication No. WO 98/56892),TR1O (International Publication No. WO 98/54202), 312C2 (International Publication No. WO 98/06842), and TR12, and soluble forms CD 154, CD70, and CD 153.

[0931] In certain embodiments, Therapeutics of the invention are administered in combination with antiretroviral agents, nucleoside reverse transcriptase inhibitors, non-nucleoside reverse transcriptase inhibitors, and/or protease inhibitors. Nucleoside reverse transcriptase inhibitors that may be administered in combination with the Therapeutics of the invention, include, but are not limited to, RETROVIR™ (zidovudine/AZT), VIDEX™ (didanosine/ddl), HIVID™ (zalcitabine/ddC), ZERIT™ (stavudine/d4T), EPIVIR™ (lamivudine/3TC), and COMBIVIR™ (zidovudine/lamivudine). Non-nucleoside reverse transcriptase inhibitors that may be administered in combination with the Therapeutics of the invention, include, but are not limited to, VIRAMUNE™ (nevirapine), RESCRIPTOR™ (delavirdine), and SUSTIVA™ (efavirenz). Protease inhibitors that may be administered in combination with the Therapeutics of the invention, include, but are not limited to, CRIXIVAN™ (indinavir), NORVIR™ (ritonavir), INVIRASE™ (saquinavir), and VIRACEPT™ (nelfinavir). In a specific embodiment, antiretroviral agents, nucleoside reverse transcriptase inhibitors, non-nucleoside reverse transcriptase inhibitors, and/or protease inhibitors may be used in any combination with Therapeutics of the invention to treat AIDS and/or to prevent or treat HIV infection.

[0932] In other embodiments, Therapeutics of the invention may be administered in combination with anti-opportunistic infection agents. Anti-opportunistic agents that may be administered in combination with the Therapeutics of the invention, include, but are not limited to, TRIMETHOPRIM-SULFAMETHOXAZOLE™, DAPSONE™, PENTAMIDE™, ATOVAQUONE™, ISONIAZID™, RIFAMPIN™, PYRAZINAMIDE™, ETHAMBUTOL™, RIFABUTIN™, CLARITHROMYCIN™, AZITHROMYCIN™, GANCICLOVIR™, FOSCARNET™, CIDOFOVIR™, FLUCONAZOLE™, ITRACONAZOLE™, KETOCONAZOLE™, ACYCLOVIR™, FAMCICOLVIR™, PYRIMETHAMINE™, LEUCOVORIN™, NEUPOGEN™ (filgrastim/G-CSF), and LEUKINE™ (sargramostim/GM-CSF). In a specific embodiment, Therapeutics of the invention are used in any combination with TRIMETHOPRIM-SULFAMETHOXAZOLE™, DAPSONE™, PENTAMIDINE™, and/or ATOVAQUONE™ to prophylactically treat or prevent an opportunistic Pneumocystis carinii pneumonia infection. In another specific embodiment, Therapeutics of the invention are used in any combination with ISONIAZID™, RIFAMPIN™, PYRAZINAMIDE™, and/or ETHAMBUTOL™ to prophylactically treat or prevent an opportunistic Mycobacterium avium complex infection. In another specific embodiment, Therapeutics of the invention are used in any combination with RIFABUTIN™, CLARITHROMYCIN™, and/or AZITHROMYCIN™ to prophylactically treat or prevent an opportunistic Mycobacterium tuberculosis infection. In another specific embodiment, Therapeutics of the invention are used in any combination with GANCICLOVIR™, FOSCARNET™, and/or CIDOFOVIR™ to prophylactically treat or prevent an opportunistic cytomegalovirus infection. In another specific embodiment, Therapeutics of the invention are used in any combination with FLUCONAZOLE™, ITRACONAZOLE™, and/or KETOCONAZOLE™ to prophylactically treat or prevent an opportunistic fungal infection. In another specific embodiment, Therapeutics of the invention are used in any combination with ACYCLOVIR™ and/or FAMCICOLVIR™ to prophylactically treat or prevent an opportunistic herpes simplex virus type I and/or type II infection. In another specific embodiment, Therapeutics of the invention are used in any combination with PYRIMETHAMNE™ and/or LEUCOVORIN™ to prophylactically treat or prevent an opportunistic Toxoplasma gondii infection. In another specific embodiment, Therapeutics of the invention are used in any combination with LEUCOVORIN™ and/or NEUPOGEN™ to prophylactically treat or prevent an opportunistic bacterial infection.

[0933] In a further embodiment, the Therapeutics of the invention are administered in combination with an antiviral agent. Antiviral agents that may be administered with the Therapeutics of the invention include, but are not limited to, acyclovir, ribavirin, amantadine, and remantidine.

[0934] In a further embodiment, the Therapeutics of the invention are administered in combination with an antibiotic agent. Antibiotic agents that may be administered with the Therapeutics of the invention include, but are not limited to, amoxicillin, beta-lactamases, aminoglycosides, beta-lactam (glycopeptide), beta-lactamases, Clindamycin, chloramphenicol, cephalosporins, ciprofloxacin, ciprofloxacin, erythromycin, fluoroquinolones, macrolides, metronidazole, penicillins, quinolones, rifampin, streptomycin, sulfonamide, tetracyclines, trimethoprim, trimethoprim-sulfamthoxazole, and vancomycin.

[0935] Conventional nonspecific immunosuppressive agents, that may be administered in combination with the Therapeutics of the invention include, but are not limited to, steroids, cyclosporine, cyclosporine analogs, cyclophosphamide methylprednisone, prednisone, azathioprine, FK-506, 15-deoxyspergualin, and other immunosuppressive agents that act by suppressing the function of responding T cells.

[0936] In specific embodiments, Therapeutics of the invention are administered in combination with immunosuppressants. Immunosuppressants preparations that may be administered with the Therapeutics of the invention include, but are not limited to, ORTHOCLONE™ (OKT3), SANDIMMUNE™/NEORAL™/SANGDYA™ (cyclosporin), PROGRAF™ (tacrolimus), CELLCEPT™ (mycophenolate), Azathioprine, glucorticosteroids, and RAPAMUNE™ (sirolimus). In a specific embodiment, immunosuppressants may be used to prevent rejection of organ or bone marrow transplantation.

[0937] In an additional embodiment, Therapeutics of the invention are administered alone or in combination with one or more intravenous immune globulin preparations. Intravenous immune globulin preparations that may be administered with the Therapeutics of the invention include, but not limited to, GAMMAR™, IVEEGAM™, SANDOGLOBULIN™, GAMMAGARD S/D™, and GAMIMUNE™. In a specific embodiment, Therapeutics of the invention are administered in combination with intravenous immune globulin preparations in transplantation therapy (e.g., bone marrow transplant).

[0938] In an additional embodiment, the Therapeutics of the invention are administered alone or in combination with an anti-inflammatory agent. Anti-inflammatory agents that may be administered with the Therapeutics of the invention include, but are not limited to, glucocorticoids and the nonsteroidal anti-inflammatories, aminoarylcarboxylic acid derivatives, arylacetic acid derivatives, arylbutyric acid derivatives, arylcarboxylic acids, arylpropionic acid derivatives, pyrazoles, pyrazolones, salicylic acid derivatives, thiazinecarboxamides, e-acetamidocaproic acid, S-adenosylmethionine, 3-amino-4-hydroxybutyric acid, amixetrine, bendazac, benzydamine, bucolome, difenpiramide, ditazol, emorfazone, guaiazulene, nabumetone, nimesulide, orgotein, oxaceprol, paranyline, perisoxal, pifoxime, proquazone, proxazole, and tenidap.

[0939] In another embodiment, compostions of the invention are administered in combination with a chemotherapeutic agent. Chemotherapeutic agents that may be administered with the Therapeutics of the invention include, but are not limited to, antibiotic derivatives (e.g., doxorubicin, bleomycin, daunorubicin, and dactinomycin); antiestrogens (e.g., tamoxifen); antimetabolites (e.g., fluorouracil, 5-FU, methotrexate, floxuridine, interferon alpha-2b, glutamic acid, plicamycin, mercaptopurine, and 6-thioguanine); cytotoxic agents (e.g., carmustine, BCNU, lomustine, CCNU, cytosine arabinoside, cyclophosphamide, estramustine, hydroxyurea, procarbazine, mitomycin, busulfan, cis-platin, and vincristine sulfate); hormones (e.g., medroxyprogesterone, estramustine phosphate sodium, ethinyl estradiol, estradiol, megestrol acetate, methyltestosterone, diethylstilbestrol diphosphate, chlorotrianisene, and testolactone); nitrogen mustard derivatives (e.g., mephalen, chorambucil, mechlorethamine (nitrogen mustard) and thiotepa); steroids and combinations (e.g., bethamethasone sodium phosphate); and others (e.g., dicarbazine, asparaginase, mitotane, vincristine sulfate, vinblastine sulfate, and etoposide).

[0940] In a specific embodiment, Therapeutics of the invention are administered in combination with CHOP (cyclophosphamide, doxorubicin, vincristine, and prednisone) or any combination of the components of CHOP. In another embodiment, Therapeutics of the invention are administered in combination with Rituximab. In a further embodiment, Therapeutics of the invention are administered with Rituxmab and CHOP, or Rituxmab and any combination of the components of CHOP.

[0941] In an additional embodiment, the Therapeutics of the invention are administered in combination with cytokines. Cytokines that may be administered with the Therapeutics of the invention include, but are not limited to, IL2, IL3, IL4, IL5, IL6, IL7, IL10, IL12, IL13, IL15, anti-CD40, CD40L, IFN-gamma and TNF-alpha. In another embodiment, Therapeutics of the invention may be administered with any interleukin, including, but not limited to, IL-1alpha, IL-1beta, IL-2, IL-3, IL-4, IL-5, IL-6, IL-7, IL-8, IL-9, IL-10, IL-11, IL-12, IL-13, IL-14, IL-15, IL-16, IL-17, IL-18, IL-19, IL-20, and IL-21.

[0942] In an additional embodiment, the Therapeutics of the invention are administered in combination with angiogenic proteins. Angiogenic proteins that may be administered with the Therapeutics of the invention include, but are not limited to, Glioma Derived Growth Factor (GDGF), as disclosed in European Patent Number EP-399816; Platelet Derived Growth Factor-A (PDGF-A), as disclosed in European Patent Number EP-6821 10; Platelet Derived Growth Factor-B (PDGF-B), as disclosed in European Patent Number EP-282317; Placental Growth Factor (PlGF), as disclosed in International Publication Number WO 92/06194; Placental Growth Factor-2 (PlGF-2), as disclosed in Hauser et al., Gorwth Factors, 4:259-268 (1993); Vascular Endothelial Growth Factor (VEGF), as disclosed in International Publication Number WO 90/13649; Vascular Endothelial Growth Factor-A (VEGF-A), as disclosed in European Patent Number EP-506477; Vascular Endothelial Growth Factor-2 (VEGF-2), as disclosed in International Publication Number WO 96/39515; Vascular Endothelial Growth Factor B (VEGF-3); Vascular Endothelial Growth Factor B-186 (VEGF-B186), as disclosed in International Publication Number WO 96/26736; Vascular Endothelial Growth Factor-D (VEGF-D), as disclosed in International Publication Number WO 98/02543; Vascular Endothelial Growth Factor-D (VEGF-D), as disclosed in International Publication Number WO 98/07832; and Vascular Endothelial Growth Factor-E (VEGF-E), as disclosed in German Patent Number DE19639601. The above mentioned references are incorporated herein by reference herein.

[0943] In an additional embodiment, the Therapeutics of the invention are administered in combination with hematopoietic growth factors. Hematopoietic growth factors that may be administered with the Therapeutics of the invention include, but are not limited to, LEUKINE™ (SARGRAMOSTIM™) and NEUPOGEN™ (FILGRASTIM™).

[0944] In an additional embodiment, the Therapeutics of the invention are administered in combination with Fibroblast Growth Factors. Fibroblast Growth Factors that may be administered with the Therapeutics of the invention include, but are not limited to, FGF-1, FGF-2, FGF-3, FGF-4, FGF-5, FGF-6, FGF-7, FGF-8, FGF-9, FGF-10, FGF-11, FGF-12, FGF-13, FGF-14, and FGF-15.

[0945] In additional embodiments, the Therapeutics of the invention are administered in combination with other therapeutic or prophylactic regimens, such as, for example, radiation therapy.

### Example 14

### Method of Treating Decreased Levels of the Polypeptide

[0946] The present invention relates to a method for treating an individual in need of an increased level of a polypeptide of the invention in the body comprising administering to such an individual a composition comprising a therapeutically effective amount of an agonist of the invention (including polypeptides of the invention). Moreover, it will be appreciated that conditions caused by a decrease in the standard or normal expression level of a polypeptide of the present invention in an individual can be treated by administering the agonist or antagonist of the present invention. Thus, the invention also provides a method of treatment of an individual in need of an increased level of the polypeptide comprising administering to such an individual a Therapeutic comprising an amount of the agonist or antagonist to increase the activity level of the polypeptide in such an individual.

[0947] For example, a patient with decreased levels of a polypeptide receives a daily dose 0.1-100 ug/kg of the agonist or antagonist for six consecutive days. The exact details of the dosing scheme, based on administration and formulation, are provided in Example 13.

### Example 15

### Method of Treating Increased Levels of the Polypeptide

[0948] The present invention also relates to a method of treating an individual in need of a decreased level of a polypeptide of the invention in the body comprising administering to such an individual a composition comprising a therapeutically effective amount of an antagonist of the invention (including polypeptides and antibodies of the invention).

[0949] In one example, antisense technology is used to inhibit production of a polypeptide of the present invention. This technology is one example of a method of decreasing levels of a polypeptide, due to a variety of etiologies, such as cancer.

[0950] For example, a patient diagnosed with abnormally increased levels of a polypeptide is administered intravenously antisense polynucleotides at 0.5, 1.0, 1.5, 2.0 and 3.0 mg/kg day for 21 days. This treatment is repeated after a 7-day rest period if the treatment was well tolerated. The formulation of the antisense polynucleotide is provided in Example 13.

### Example 16

### Method of Treatment Using Gene Therapy-Ex Vivo

[0951] One method of gene therapy transplants fibroblasts, which are capable of expressing a polypeptide, onto a patient. Generally, fibroblasts are obtained from a subject by skin biopsy. The resulting tissue is placed in tissue-culture medium and separated into small pieces. Small chunks of the tissue are placed on a wet surface of a tissue culture flask, approximately ten pieces are placed in each flask. The flask is turned upside down, closed tight and left at room temperature over night. After 24 hours at room temperature, the flask is inverted and the chunks of tissue remain fixed to the bottom of the flask and fresh media (e.g., Ham's F12 media, with 10% FBS, penicillin and streptomycin) is added. The flasks are then incubated at 37 degree C for approximately one week.

[0952] At this time, fresh media is added and subsequently changed every several days. After an additional two weeks in culture, a monolayer of fibroblasts emerge. The monolayer is trypsinized and scaled into larger flasks.

[0953] pMV-7 (Kirschmeier, P. T. et al., DNA, 7:219-25 (1988)), flanked by the long terminal repeats of the Moloney murine sarcoma virus, is digested with EcoRI and HindIII and subsequently treated with calf intestinal phosphatase. The linear vector is fractionated on agarose gel and purified, using glass beads.

[0954] The cDNA encoding a polypeptide of the present invention can be amplified using PCR primers which correspond to the 5′ and 3′ end sequences respectively as set forth in Example 1 using primers and having appropriate restriction sites and initiation/stop codons, if necessary. Preferably, the 5′ primer contains an EcoRI site and the 3′ primer includes a HindIII site. Equal quantities of the Moloney murine sarcoma virus linear backbone and the amplified EcoRI and HindIII fragment are added together, in the presence of T4 DNA ligase. The resulting mixture is maintained under conditions appropriate for ligation of the two fragments. The ligation mixture is then used to transform bacteria HB 101, which are then plated onto agar containing kanamycin for the purpose of confirming that the vector has the gene of interest properly inserted.

[0955] The amphotropic pA317 or GP+am12 packaging cells are grown in tissue culture to confluent density in Dulbecco's Modified Eagles Medium (DMEM) with 10% calf serum (CS), penicillin and streptomycin. The MSV vector containing the gene is then added to the media and the packaging cells transduced with the vector. The packaging cells now produce infectious viral particles containing the gene (the packaging cells are now referred to as producer cells).

[0956] Fresh media is added to the transduced producer cells, and subsequently, the media is harvested from a 10 cm plate of confluent producer cells. The spent media, containing the infectious viral particles, is filtered through a millipore filter to remove detached producer cells and this media is then used to infect fibroblast cells. Media is removed from a sub-confluent plate of fibroblasts and quickly replaced with the media from the producer cells. This media is removed and replaced with fresh media. If the titer of virus is high, then virtually all fibroblasts will be infected and no selection is required. If the titer is very low, then it is necessary to use a retroviral vector that has a selectable marker, such as neo or his. Once the fibroblasts have been efficiently infected, the fibroblasts are analyzed to determine whether protein is produced.

[0957] The engineered fibroblasts are then transplanted onto the host, either alone or after having been grown to confluence on cytodex 3 microcarrier beads.

### Example 17

### Gene Therapy Using Endogenous Genes Corresponding To Polynucleotides of the Invention

[0958] Another method of gene therapy according to the present invention involves operably associating the endogenous polynucleotide sequence of the invention with a promoter via homologous recombination as described, for example, in U.S. Pat. No. 5,641,670, issued Jun. 24, 1997; International Publication NO: WO 96/29411, published Sep. 26, 1996; International Publication NO: WO 94/12650, published Aug. 4, 1994; Koller et al., Proc. Natl. Acad. Sci. USA, 86:8932-8935 (1989); and Zijlstra et al., Nature, 342:435-438 (1989). This method involves the activation of a gene which is present in the target cells, but which is not expressed in the cells, or is expressed at a lower level than desired.

[0959] Polynucleotide constructs are made which contain a promoter and targeting sequences, which are homologous to the 5′ non-coding sequence of endogenous polynucleotide sequence, flanking the promoter. The targeting sequence will be sufficiently near the 5′ end of the polynucleotide sequence so the promoter will be operably linked to the endogenous sequence upon homologous recombination. The promoter and the targeting sequences can be amplified using PCR. Preferably, the amplified promoter contains distinct restriction enzyme sites on the 5′ and 3′ ends. Preferably, the 3′ end of the first targeting sequence contains the same restriction enzyme site as the 5′ end of the amplified promoter and the 5′ end of the second targeting sequence contains the same restriction site as the 3′ end of the amplified promoter.

[0960] The amplified promoter and the amplified targeting sequences are digested with the appropriate restriction enzymes and subsequently treated with calf intestinal phosphatase. The digested promoter and digested targeting sequences are added together in the presence of T4 DNA ligase. The resulting mixture is maintained under conditions appropriate for ligation of the two fragments. The construct is size fractionated on an agarose gel then purified by phenol extraction and ethanol precipitation.

[0961] In this Example, the polynucleotide constructs are administered as naked polynucleotides via electroporation. However, the polynucleotide constructs may also be administered with transfection-facilitating agents, such as liposomes, viral sequences, viral particles, precipitating agents, etc. Such methods of delivery are known in the art.

[0962] Once the cells are transfected, homologous recombination will take place which results in the promoter being operably linked to the endogenous polynucleotide sequence. This results in the expression of polynucleotide corresponding to the polynucleotide in the cell. Expression may be detected by immunological staining, or any other method known in the art.

[0963] Fibroblasts are obtained from a subject by skin biopsy. The resulting tissue is placed in DMEM+10% fetal calf serum. Exponentially growing or early stationary phase fibroblasts are trypsinized and rinsed from the plastic surface with nutrient medium. An aliquot of the cell suspension is removed for counting, and the remaining cells are subjected to centrifugation. The supernatant is aspirated and the pellet is resuspended in 5 ml of electroporation buffer (20 mM HEPES pH 7.3, 137 mM NaCl, 5 mM KCl, 0.7 mM Na₂ HPO₄, 6 mM dextrose). The cells are recentrifuged, the supernatant aspirated, and the cells resuspended in electroporation buffer containing 1 mg/ml acetylated bovine serum albumin. The final cell suspension contains approximately 3×10⁶ cells/ml. Electroporation should be performed immediately following resuspension.

[0964] Plasmid DNA is prepared according to standard techniques. For example, to construct a plasmid for targeting to the locus corresponding to the polynucleotide of the invention, plasmid pUC18 (MBI Fermentas, Amherst, NY) is digested with HindIII. The CMV promoter is amplified by PCR with an Xbal site on the 5′ end and a BamHi site on the 3′end. Two non-coding sequences are amplified via PCR: one non-coding sequence (fragment 1) is amplified with a HindIII site at the 5′ end and an Xba site at the 3′end; the other non-coding sequence (fragment 2) is amplified with a BamHil site at the 5′end and a HindIII site at the 3′end. The CMV promoter and the fragments (1 and 2) are digested with the appropriate enzymes (CMV promoter—XbaI and BamHI; fragment 1 - XbaI; fragment 2—BamHi) and ligated together. The resulting ligation product is digested with HindIII, and ligated with the HindIII-digested pUC18 plasmid.

[0965] Plasmid DNA is added to a sterile cuvette with a 0.4 cm electrode gap (Bio-Rad). The final DNA concentration is generally at least 120 μg/ml. 0.5 ml of the cell suspension (containing approximately 1.5×10⁶ cells) is then added to the cuvette, and the cell suspension and DNA solutions are gently mixed. Electroporation is performed with a Gene-Pulser apparatus (Bio-Rad). Capacitance and voltage are set at 960 μF and 250-300 V, respectively. As voltage increases, cell survival decreases, but the percentage of surviving cells that stably incorporate the introduced DNA into their genome increases dramatically. Given these parameters, a pulse time of approximately 14-20 mSec should be observed.

[0966] Electroporated cells are maintained at room temperature for approximately 5 min, and the contents of the cuvette are then gently removed with a sterile transfer pipette. The cells are added directly to 10 ml of prewarmed nutrient media (DMEM with 15% calf serum) in a 10 cm dish and incubated at 37 degree C. The following day, the media is aspirated and replaced with 10 ml of fresh media and incubated for a further 16-24 hours.

[0967] The engineered fibroblasts are then injected into the host, either alone or after having been grown to confluence on cytodex 3 microcarrier beads. The fibroblasts now produce the protein product. The fibroblasts can then be introduced into a patient as described above.

### Example 18

### Method of Treatment Using Gene Therapy—In Vivo

[0968] Another aspect of the present invention is using in vivo gene therapy methods to treat disorders, diseases and conditions. The gene therapy method relates to the introduction of naked nucleic acid (DNA, RNA, and antisense DNA or RNA) sequences into an animal to increase or decrease the expression of the polypeptide. The polynucleotide of the present invention may be operatively linked to a promoter or any other genetic elements necessary for the expression of the polypeptide by the target tissue. Such gene therapy and delivery techniques and methods are known in the art, see, for example, WO90/11092, W098/11779; U.S. Pat. NO. 5693622, 5705151, 5580859; Tabata et al., Cardiovasc. Res. 35(3):470-479 (1997); Chao et al., Pharmacol. Res. 35(6):517-522 (1997); Wolff, Neuromuscul. Disord. 7(5):314-318 (1997); Schwartz et al., Gene Ther. 3(5):405-411 (1996); Tsurumi et al., Circulation 94(12):3281-3290 (1996) (incorporated herein by reference).

[0969] The polynucleotide constructs may be delivered by any method that delivers injectable materials to the cells of an animal, such as, injection into the interstitial space of tissues (heart, muscle, skin, lung, liver, intestine and the like). The polynucleotide constructs can be delivered in a pharmaceutically acceptable liquid or aqueous carrier.

[0970] The term “naked” polynucleotide, DNA or RNA, refers to sequences that are free from any delivery vehicle that acts to assist, promote, or facilitate entry into the cell, including viral sequences, viral particles, liposome formulations, lipofectin or precipitating agents and the like. However, the polynucleotides of the present invention may also be delivered in liposome formulations (such as those taught in Felgner P.L. et al. (1995) Ann. NY Acad. Sci. 772:126-139 and Abdallah B. et al. (1995) Biol. Cell 85(1):1-7) which can be prepared by methods well known to those skilled in the art.

[0971] The polynucleotide vector constructs used in the gene therapy method are preferably constructs that will not integrate into the host genome nor will they contain sequences that allow for replication. Any strong promoter known to those skilled in the art can be used for driving the expression of DNA. Unlike other gene therapies techniques, one major advantage of introducing naked nucleic acid sequences into target cells is the transitory nature of the polynucleotide synthesis in the cells. Studies have shown that non-replicating DNA sequences can be introduced into cells to provide production of the desired polypeptide for periods of up to six months.

[0972] The polynucleotide construct can be delivered to the interstitial space of tissues within the an animal, including of muscle, skin, brain, lung, liver, spleen, bone marrow, thymus, heart, lymph, blood, bone, cartilage, pancreas, kidney, gall bladder, stomach, intestine, testis, ovary, uterus, rectum, nervous system, eye, gland, and connective tissue. Interstitial space of the tissues comprises the intercellular fluid, mucopolysaccharide matrix among the reticular fibers of organ tissues, elastic fibers in the walls of vessels or chambers, collagen fibers of fibrous tissues, or that same matrix within connective tissue ensheathing muscle cells or in the lacunae of bone. It is similarly the space occupied by the plasma of the circulation and the lymph fluid of the lymphatic channels. Delivery to the interstitial space of muscle tissue is preferred for the reasons discussed below. They may be conveniently delivered by injection into the tissues comprising these cells. They are preferably delivered to and expressed in persistent, non-dividing cells which are differentiated, although delivery and expression may be achieved in non-differentiated or less completely differentiated cells, such as, for example, stem cells of blood or skin fibroblasts. In vivo muscle cells are particularly competent in their ability to take up and express polynucleotides.

[0973] For the naked polynucleotide injection, an effective dosage amount of DNA or RNA will be in the range of from about 0.05 g/kg body weight to about 50 mg/kg body weight. Preferably the dosage will be from about 0.005 mg/kg to about 20 mg/kg and more preferably from about 0.05 mg/kg to about 5 mg/kg. Of course, as the artisan of ordinary skill will appreciate, this dosage will vary according to the tissue site of injection. The appropriate and effective dosage of nucleic acid sequence can readily be determined by those of ordinary skill in the art and may depend on the condition being treated and the route of administration. The preferred route of administration is by the parenteral route of injection into the interstitial space of tissues. However, other parenteral routes may also be used, such as, inhalation of an aerosol formulation particularly for delivery to lungs or bronchial tissues, throat or mucous membranes of the nose. In addition, naked polynucleotide constructs can be delivered to arteries during angioplasty by the catheter used in the procedure.

[0974] The dose response effects of injected polynucleotide in muscle in vivo is determined as follows. Suitable template DNA for production of mRNA coding for polypeptide of the present invention is prepared in accordance with a standard recombinant DNA methodology. The template DNA, which may be either circular or linear, is either used as naked DNA or complexed with liposomes. The quadriceps muscles of mice are then injected with various amounts of the template DNA.

[0975] Five to six week old female and male Balb/C mice are anesthetized by intraperitoneal injection with 0.3 ml of 2.5% Avertin. A 1.5 cm incision is made on the anterior thigh, and the quadriceps muscle is directly visualized. The template DNA is injected in 0.1 ml of carrier in a 1 cc syringe through a 27 gauge needle over one minute, approximately 0.5 cm from the distal insertion site of the muscle into the knee and about 0.2 cm deep. A suture is placed over the injection site for future localization, and the skin is closed with stainless steel clips.

[0976] After an appropriate incubation time (e.g., 7 days) muscle extracts are prepared by excising the entire quadriceps. Every fifth 15 um cross-section of the individual quadriceps muscles is histochemically stained for protein expression. A time course for protein expression may be done in a similar fashion except that quadriceps from different mice are harvested at different times. Persistence of DNA in muscle following injection may be determined by Southern blot analysis after preparing total cellular DNA and HIRT supernatants from injected and control mice. The results of the above experimentation in mice can be use to extrapolate proper dosages and other treatment parameters in humans and other animals using naked DNA.

### Example 19

### Transgenic Animals

[0977] The polypeptides of the invention can also be expressed in transgenic animals. Animals of any species, including, but not limited to, mice, rats, rabbits, hamsters, guinea pigs, pigs, micro-pigs, goats, sheep, cows and non-human primates, e.g., baboons, monkeys, and chimpanzees may be used to generate transgenic animals. In a specific embodiment, techniques described herein or otherwise known in the art, are used to express polypeptides of the invention in humans, as part of a gene therapy protocol.

[0978] Any technique known in the art may be used to introduce the transgene (i.e., polynucleotides of the invention) into animals to produce the founder lines of transgenic animals. Such techniques include, but are not limited to, pronuclear microinjection (Paterson et al., Appl. Microbiol. Biotechnol. 40:691-698 (1994); Carver et al., Biotechnology (NY) 11:1263-1270 (1993); Wright et al., Biotechnology (NY) 9:830-834 (1991); and Hoppe et al., U.S. Pat. No. 4,873,191 (1989)); retrovirus mediated gene transfer into germ lines (Van der Putten et al., Proc. Natl. Acad. Sci., USA 82:6148-6152 (1985)), blastocysts or embryos; gene targeting in embryonic stem cells (Thompson et al., Cell 56:313-321 (1989)); electroporation of cells or embryos (Lo, 1983, Mol Cell. Biol. 3:1803-1814 (1983)); introduction of the polynucleotides of the invention using a gene gun (see, e.g., Ulmer et al., Science 259:1745 (1993); introducing nucleic acid constructs into embryonic pleuripotent stem cells and transferring the stem cells back into the blastocyst; and sperm-mediated gene transfer (Lavitrano et al., Cell 57:717-723 (1989); etc. For a review of such techniques, see Gordon, “Transgenic Animals,” Intl. Rev. Cytol. 115:171-229 (1989), which is incorporated by reference herein in its entirety.

[0979] Any technique known in the art may be used to produce transgenic clones containing polynucleotides of the invention, for example, nuclear transfer into enucleated oocytes of nuclei from cultured embryonic, fetal, or adult cells induced to quiescence (Campell et al., Nature 380:64-66 (1996); Wilmut et al., Nature 385:810-813 (1997)).

[0980] The present invention provides for transgenic animals that carry the transgene in all their cells, as well as animals which carry the transgene in some, but not all their cells, i.e., mosaic animals or chimeric. The transgene may be integrated as a single transgene or as multiple copies such as in concatamers, e.g., head-to-head tandems or head-to-tail tandems. The transgene may also be selectively introduced into and activated in a particular cell type by following, for example, the teaching of Lasko et al. (Lasko et al., Proc. Natl. Acad. Sci. USA 89:6232-6236 (1992)). The regulatory sequences required for such a cell-type specific activation will depend upon the particular cell type of interest, and will be apparent to those of skill in the art. When it is desired that the polynucleotide transgene be integrated into the chromosomal site of the endogenous gene, gene targeting is preferred. Briefly, when such a technique is to be utilized, vectors containing some nucleotide sequences homologous to the endogenous gene are designed for the purpose of integrating, via homologous recombination with chromosomal sequences, into and disrupting the function of the nucleotide sequence of the endogenous gene. The transgene may also be selectively introduced into a particular cell type, thus inactivating the endogenous gene in only that cell type, by following, for example, the teaching of Gu et al. (Gu et al., Science 265:103-106 (1994)). The regulatory sequences required for such a cell-type specific inactivation will depend upon the particular cell type of interest, and will be apparent to those of skill in the art.

[0981] Once transgenic animals have been generated, the expression of the recombinant gene may be assayed utilizing standard techniques. Initial screening may be accomplished by Southern blot analysis or PCR techniques to analyze animal tissues to verify that integration of the transgene has taken place. The level of mRNA expression of the transgene in the tissues of the transgenic animals may also be assessed using techniques which include, but are not limited to, Northern blot analysis of tissue samples obtained from the animal, in situ hybridization analysis, and reverse transcriptase-PCR (rt-PCR). Samples of transgenic gene-expressing tissue may also be evaluated immunocytochemically or immunohistochemically using antibodies specific for the transgene product.

[0982] Once the founder animals are produced, they may be bred, inbred, outbred, or crossbred to produce colonies of the particular animal. Examples of such breeding strategies include, but are not limited to: outbreeding of founder animals with more than one integration site in order to establish separate lines; inbreeding of separate lines in order to produce compound transgenics that express the transgene at higher levels because of the effects of additive expression of each transgene; crossing of heterozygous transgenic animals to produce animals homozygous for a given integration site in order to both augment expression and eliminate the need for screening of animals by DNA analysis; crossing of separate homozygous lines to produce compound heterozygous or homozygous lines; and breeding to place the transgene on a distinct background that is appropriate for an experimental model of interest.

[0983] Transgenic animals of the invention have uses which include, but are not limited to, animal model systems useful in elaborating the biological function of polypeptides of the present invention, studying conditions and/or disorders associated with aberrant expression, and in screening for compounds effective in ameliorating such conditions and/or disorders.

### Example 20

### Knock-Out Animals

[0984] Endogenous gene expression can also be reduced by inactivating or “knocking out” the gene and/or its promoter using targeted homologous recombination. (E.g., see Smithies et al., Nature 317:230-234 (1985); Thomas & Capecchi, Cell 51:503-512 (1987); Thompson et al., Cell 5:313-321 (1989); each of which is incorporated by reference herein in its entirety). For example, a mutant, non-functional polynucleotide of the invention (or a completely unrelated DNA sequence) flanked by DNA homologous to the endogenous polynucleotide sequence (either the coding regions or regulatory regions of the gene) can be used, with or without a selectable marker and/or a negative selectable marker, to transfect cells that express polypeptides of the invention in vivo. In another embodiment, techniques known in the art are used to generate knockouts in cells that contain, but do not express the gene of interest. Insertion of the DNA construct, via targeted homologous recombination, results in inactivation of the targeted gene. Such approaches are particularly suited in research and agricultural fields where modifications to embryonic stem cells can be used to generate animal offspring with an inactive targeted gene (e.g., see Thomas & Capecchi 1987 and Thompson 1989, supra). However this approach can be routinely adapted for use in humans provided the recombinant DNA constructs are directly administered or targeted to the required site in vivo using appropriate viral vectors that will be apparent to those of skill in the art.

[0985] In further embodiments of the invention, cells that are genetically engineered to express the polypeptides of the invention, or alternatively, that are genetically engineered not to express the polypeptides of the invention (e.g., knockouts) are administered to a patient in vivo. Such cells may be obtained from the patient (i.e., animal, including human) or an MHC compatible donor and can include, but are not limited to fibroblasts, bone marrow cells, blood cells (e.., lymphocytes), adipocytes, muscle cells, endothelial cells etc. The cells are genetically engineered in vitro using recombinant DNA techniques to introduce the coding sequence of polypeptides of the invention into the cells, or alternatively, to disrupt the coding sequence and/or endogenous regulatory sequence associated with the polypeptides of the invention, e.g., by transduction (using viral vectors, and preferably vectors that integrate the transgene into the cell genome) or transfection procedures, including, but not limited to, the use of plasmids, cosmids, YACs, naked DNA, electroporation, liposomes, etc. The coding sequence of the polypeptides of the invention can be placed under the control of a strong constitutive or inducible promoter or promoter/enhancer to achieve expression, and preferably secretion, of the polypeptides of the invention. The engineered cells which express and preferably secrete the polypeptides of the invention can be introduced into the patient systemically, e.g., in the circulation, or intraperitoneally.

[0986] Alternatively, the cells can be incorporated into a matrix and implanted in the body, eg., genetically engineered fibroblasts can be implanted as part of a skin graft; genetically engineered endothelial cells can be implanted as part of a lymphatic or vascular graft. (See, for example, Anderson et al. U.S. Pat. No. 5,399,349; and Mulligan & Wilson, U.S. Pat. No. 5,460,959 each of which is incorporated by reference herein in its entirety).

[0987] When the cells to be administered are non-autologous or non-MHC compatible cells, they can be administered using well known techniques which prevent the development of a host immune response against the introduced cells. For example, the cells may be introduced in an encapsulated form which, while allowing for an exchange of components with the immediate extracellular environment, does not allow the introduced cells to be recognized by the host immune system.

[0988] Transgenic and “knock-out” animals of the invention have uses which include, but are not limited to, animal model systems useful in elaborating the biological function of polypeptides of the present invention, studying conditions and/or disorders associated with aberrant expression, and in screening for compounds effective in ameliorating such conditions and/or disorders.

### Example 21

### Assays Detecting Stimulation or Inhibition of B cell Proliferation and Differentiation

[0989] Generation of functional humoral immune responses requires both soluble and cognate signaling between B-lineage cells and their microenvironment. Signals may impart a positive stimulus that allows a B-lineage cell to continue its programmed development, or a negative stimulus that instructs the cell to arrest its current developmental pathway. To date, numerous stimulatory and inhibitory signals have been found to influence B cell responsiveness including IL-2, IL-4, IL-5, IL-6, IL-7, IL10, IL-13, IL-14 and IL-15. Interestingly, these signals are by themselves weak effectors but can, in combination with various co-stimulatory proteins, induce activation, proliferation, differentiation, homing, tolerance and death among B cell populations.

[0990] One of the best studied classes of B-cell co-stimulatory proteins is the TNF-superfamily. Within this family CD40, CD27, and CD30 along with their respective ligands CD154, CD70, and CD153 have been found to regulate a variety of immune responses. Assays which allow for the detection and/or observation of the proliferation and differentiation of these B-cell populations and their precursors are valuable tools in determining the effects various proteins may have on these B-cell populations in terms of proliferation and differentiation. Listed below are two assays designed to allow for the detection of the differentiation, proliferation, or inhibition of B-cell populations and their precursors.

[0991] In Vitro Assay—Agonists or antagonists of the invention can be assessed for its ability to induce activation, proliferation, differentiation or inhibition and/or death in B-cell populations and their precursors. The activity of the agonists or antagonists of the invention on purified human tonsillar B cells, measured qualitatively over the dose range from 0.1 to 10,000 ng/mL, is assessed in a standard B-lymphocyte co-stimulation assay in which purified tonsillar B cells are cultured in the presence of either formalin-fixed Staphylococcus aureus Cowan I (SAC) or immobilized anti-human IgM antibody as the priming agent. Second signals such as IL-2 and IL-15 synergize with SAC and IgM crosslinking to elicit B cell proliferation as measured by tritiated-thymidine incorporation. Novel synergizing agents can be readily identified using this assay. The assay involves isolating human tonsillar B cells by magnetic bead (MACS) depletion of CD3-positive cells. The resulting cell population is greater than 95% B cells as assessed by expression of CD45R(B220).

[0992] Various dilutions of each sample are placed into individual wells of a 96-well plate to which are added 10⁵ B-cells suspended in culture medium (RPMI 1640 containing 10% FBS, 5×10⁻⁵M 2ME, 100 U/ml penicillin, 10 ug/ml streptomycin, and 10⁻⁵ dilution of SAC) in a total volume of 150 ul. Proliferation or inhibition is quantitated by a 20 h pulse (1 uCi/well) with 3H-thymidine (6.7 Ci/mM) beginning 72 h post factor addition. The positive and negative controls are IL2 and medium respectively.

[0993] In Vivo Assay—BALB/c mice are injected (i.p.) twice per day with buffer only, or 2 mg/Kg of agonists or antagonists of the invention, or truncated forms thereof. Mice receive this treatment for 4 consecutive days, at which time they are sacrificed and various tissues and serum collected for analyses. Comparison of H&E sections from normal spleens and spleens treated with agonists or antagonists of the invention identify the results of the activity of the agonists or antagonists on spleen cells, such as the diffusion of peri-arterial lymphatic sheaths, and/or significant increases in the nucleated cellularity of the red pulp regions, which may indicate the activation of the differentiation and proliferation of B-cell populations. Immunohistochemical studies using a B cell marker, anti-CD45R(B220), are used to determine whether any physiological changes to splenic cells, such as splenic disorganization, are due to increased B-cell representation within loosely defined B-cell zones that infiltrate established T-cell regions.

[0994] Flow cytometric analyses of the spleens from mice treated with agonist or antagonist is used to indicate whether the agonists or antagonists specifically increases the proportion of ThB+, CD45R(B220)dull B cells over that which is observed in control mice.

[0995] Likewise, a predicted consequence of increased mature B-cell representation in vivo is a relative increase in serum Ig titers. Accordingly, serum IgM and IgA levels are compared between buffer and agonists or antagonists-treated mice.

[0996] The studies described in this example tested activity of agonists or antagonists of the invention. However, one skilled in the art could easily modify the exemplified studies to test the activity of polynucleotides or polypeptides of the invention (e.g., gene therapy).

### Example 22

### T Cell Proliferation Assay

[0997] A CD3-induced proliferation assay is performed on PBMCs and is measured by the uptake of ³H-thymidine. The assay is performed as follows. Ninety-six well plates are coated with 100 μl/well of mAb to CD3 (HIT3a, Pharmingen) or isotype-matched control mAb (B33.1) overnight at 4 degrees C (1 %81 g/ml in .05M bicarbonate buffer, pH 9.5), then washed three times with PBS. PBMC are isolated by F/H gradient centrifugation from human peripheral blood and added to quadruplicate wells (5×10⁴/well) of mAb coated plates in RPMI containing 10% FCS and P/S in the presence of varying concentrations of agonists or antagonists of the invention (total volume 200 ul). Relevant protein buffer and medium alone are controls. After 48 hr. culture at 37 degrees C., plates are spun for 2 min. at 1000 rpm and 100 μl of supernatant is removed and stored −20 degrees C. for measurement of IL-2 (or other cytokines) if effect on proliferation is observed. Wells are supplemented with 100 ul of medium containing 0.5 uCi of ³H-thymidine and cultured at 37 degrees C. for 18-24 hr. Wells are harvested and incorporation of ³H-thymidine used as a measure of proliferation. Anti-CD3 alone is the positive control for proliferation. IL-2 (100 U/ml) is also used as a control which enhances proliferation. Control antibody which does not induce proliferation of T cells is used as the negative controls for the effects of agonists or antagonists of the invention.

[0998] The studies described in this example tested activity of agonists or antagonists of the invention. However, one skilled in the art could easily modify the exemplified studies to test the activity of polynucleotides or polypeptides of the invention (e.g., gene therapy).

### Example 23

### Effect of Agonists or Antagonists of the Invention on the Expression of MHC Class II, Costimulatory and Adhesion Molecules and Cell Differentiation of Monocytes and Monocyte-Derived Human Dendritic Cells

[0999] Dendritic cells are generated by the expansion of proliferating precursors found in the peripheral blood: adherent PBMC or elutriated monocytic fractions are cultured for 7-10 days with GM-CSF (50 ng/ml) and IL-4 (20 ng/ml). These dendritic cells have the characteristic phenotype of immature cells (expression of CD1, CD80, CD86, CD40 and MHC class II antigens). Treatment with activating factors, such as TNF-α, causes a rapid change in surface phenotype (increased expression of MHC class I and II, costimulatory and adhesion molecules, downregulation of FCγRII, upregulation of CD83). These changes correlate with increased antigen-presenting capacity and with functional maturation of the dendritic cells.

[1000] FACS analysis of surface antigens is performed as follows. Cells are treated 1-3 days with increasing concentrations of agonist or antagonist of the invention or LPS (positive control), washed with PBS containing 1% BSA and 0.02 mM sodium azide, and then incubated with 1:20 dilution of appropriate FITC- or PE-labeled monoclonal antibodies for 30 minutes at 4 degrees C. After an additional wash, the labeled cells are analyzed by flow cytometry on a FACScan (Becton Dickinson).

[1001] Effect on the production of cytokines. Cytokines generated by dendritic cells, in particular IL-12, are important in the initiation of T-cell dependent immune responses. IL-12 strongly influences the development of Th1 helper T-cell immune response, and induces cytotoxic T and NK cell function. An ELISA is used to measure the IL-12 release as follows. Dendritic cells (10⁶/ml) are treated with increasing concentrations of agonists or antagonists of the invention for 24 hours. LPS (100 ng/ml) is added to the cell culture as positive control. Supernatants from the cell cultures are then collected and analyzed for IL-12 content using commercial ELISA kit (e..g, R & D Systems (Minneapolis, Minn.)). The standard protocols provided with the kits are used.

[1002] Effect on the expression of MHC Class II, costimulatory and adhesion molecules. Three major families of cell surface antigens can be identified on monocytes: adhesion molecules, molecules involved in antigen presentation, and Fc receptor. Modulation of the expression of MHC class II antigens and other costimulatory molecules, such as B7 and ICAM-1, may result in changes in the antigen presenting capacity of monocytes and ability to induce T cell activation. Increase expression of Fc receptors may correlate with improved monocyte cytotoxic activity, cytokine release and phagocytosis.

[1003] FACS analysis is used to examine the surface antigens as follows. Monocytes are treated 1-5 days with increasing concentrations of agonists or antagonists of the invention or LPS (positive control), washed with PBS containing 1% BSA and 0.02 mM sodium azide, and then incubated with 1:20 dilution of appropriate FITC- or PE-labeled monoclonal antibodies for 30 minutes at 4 degrees C. After an additional wash, the labeled cells are analyzed by flow cytometry on a FACScan (Becton Dickinson).

[1004] Monocyte activation and/or increased survival. Assays for molecules that activate (or alternatively, inactivate) monocytes and/or increase monocyte survival (or alternatively, decrease monocyte survival) are known in the art and may routinely be applied to determine whether a molecule of the invention functions as an inhibitor or activator of monocytes. Agonists or antagonists of the invention can be screened using the three assays described below. For each of these assays, Peripheral blood mononuclear cells (PBMC) are purified from single donor leukopacks (American Red Cross, Baltimore, Md.) by centrifugation through a Histopaque gradient (Sigma). Monocytes are isolated from PBMC by counterflow centrifugal elutriation.

[1005] Monocyte Survival Assay. Human peripheral blood monocytes progressively lose viability when cultured in absence of serum or other stimuli. Their death results from internally regulated process (apoptosis). Addition to the culture of activating factors, such as TNF-alpha dramatically improves cell survival and prevents DNA fragmentation. Propidium iodide (PI) staining is used to measure apoptosis as follows. Monocytes are cultured for 48 hours in polypropylene tubes in serum-free medium (positive control), in the presence of 100 ng/ml TNF-alpha (negative control), and in the presence of varying concentrations of the compound to be tested. Cells are suspended at a concentration of 2×10⁶/ml in PBS containing PI at a final concentration of 5 μg/ml, and then incubaed at room temperature for 5 minutes before FACScan analysis. PI uptake has been demonstrated to correlate with DNA fragmentation in this experimental paradigm.

[1006] Effect on cytokine release. An important function of monocytes/macrophages is their regulatory activity on other cellular populations of the immune system through the release of cytokines after stimulation. An ELISA to measure cytokine release is performed as follows. Human monocytes are incubated at a density of 5×10⁵ cells/ml with increasing concentrations of agonists or antagonists of the invention and under the same conditions, but in the absence of agonists or antagonists. For IL-12 production, the cells are primed overnight with IFN (100 U/ml) in presence of agonist or antagonist of the invention. LPS (10 ng/ml) is then added. Conditioned media are collected after 24h and kept frozen until use. Measurement of TNF-alpha, IL-10, MCP-1 and IL-8 is then performed using a commercially available ELISA kit (e. g, R & D Systems (Minneapolis, Minn.)) and applying the standard protocols provided with the kit.

[1007] Oxidative burst. Purified monocytes are plated in 96-w plate at 2-1×10⁵ cell/well. Increasing concentrations of agonists or antagonists of the invention are added to the wells in a total volume of 0.2 ml culture medium (RPMI 1640+10% FCS, glutamine and antibiotics). After 3 days incubation, the plates are centrifuged and the medium is removed from the wells. To the macrophage monolayers, 0.2 ml per well of phenol red solution (140 mM NaCl, 10 mM potassium phosphate buffer pH 7.0, 5.5 mM dextrose, 0.56 mM phenol red and 19 U/ml of HRPO) is added, together with the stimulant (200 nM PMA). The plates are incubated at 37° C. for 2 hours and the reaction is stopped by adding 20 μl 1N NaOH per well. The absorbance is read at 610 nm. To calculate the amount of H₂O₂ produced by the macrophages, a standard curve of a H₂O₂ solution of known molarity is performed for each experiment.

[1008] The studies described in this example tested activity of agonists or antagonists of the invention. However, one skilled in the art could easily modify the exemplified studies to test the activity of polynucleotides or polypeptides of the invention (e.g., gene therapy).

### Example 24

### Biological Effects of Agonists or Antagonists of the Invention

[1009] Astrocyte and Neuronal Assays.

[1010] Agonists or antagonists of the invention, expressed in Escherichia coli and purified as described above, can be tested for activity in promoting the survival, neurite outgrowth, or phenotypic differentiation of cortical neuronal cells and for inducing the proliferation of glial fibrillary acidic protein immunopositive cells, astrocytes. The selection of cortical cells for the bioassay is based on the prevalent expression of FGF-1 and FGF-2 in cortical structures and on the previously reported enhancement of cortical neuronal survival resulting from FGF-2 treatment. A thymidine incorporation assay, for example, can be used to elucidate an agonist or antagonist of the invention's activity on these cells.

[1011] Moreover, previous reports describing the biological effects of FGF-2 (basic FGF) on cortical or hippocampal neurons in vitro have demonstrated increases in both neuron survival and neurite outgrowth (Walicke et al., “Fibroblast growth factor promotes survival of dissociated hippocampal neurons and enhances neurite extension.” Proc. Natl. Acad. Sci. USA 83:3012-3016. (1986), assay herein incorporated by reference in its entirety). However, reports from experiments done on PC-12 cells suggest that these two responses are not necessarily synonymous and may depend on not only which FGF is being tested but also on which receptor(s) are expressed on the target cells. Using the primary cortical neuronal culture paradigm, the ability of an agonist or antagonist of the invention to induce neurite outgrowth can be compared to the response achieved with FGF-2 using, for example, a thymidine incorporation assay.

[1012] Fibroblast and endothelial cell assays.

[1013] Human lung fibroblasts are obtained from Clonetics (San Diego, Calif.) and maintained in growth media from Clonetics. Dermal microvascular endothelial cells are obtained from Cell Applications (San Diego, Calif.). For proliferation assays, the human lung fibroblasts and dermal microvascular endothelial cells can be cultured at 5,000 cells/well in a 96-well plate for one day in growth medium. The cells are then incubated for one day in 0.1% BSA basal medium. After replacing the medium with fresh 0.1% BSA medium, the cells are incubated with the test proteins for 3 days. Alamar Blue (Alamar Biosciences, Sacramento, Calif.) is added to each well to a final concentration of 10%. The cells are incubated for 4 hr. Cell viability is measured by reading in a CytoFluor fluorescence reader. For the PGE₂ assays, the human lung fibroblasts are cultured at 5,000 cells/well in a 96-well plate for one day. After a medium change to 0.1% BSA basal medium, the cells are incubated with FGF-2 or agonists or antagonists of the invention with or without IL-1α for 24 hours. The supernatants are collected and assayed for PGE₂ by EIA kit (Cayman, Ann Arbor, Mich.). For the IL-6 assays, the human lung fibroblasts are cultured at 5,000 cells/well in a 96-well plate for one day. After a medium change to 0.1% BSA basal medium, the cells are incubated with FGF-2 or with or without agonists or antagonists of the invention IL-1α for 24 hours. The supernatants are collected and assayed for IL-6 by ELISA kit (Endogen, Cambridge, Mass.).

[1014] Human lung fibroblasts are cultured with FGF-2 or agonists or antagonists of the invention for 3 days in basal medium before the addition of Alamar Blue to assess effects on growth of the fibroblasts. FGF-2 should show a stimulation at 10-2500 ng/ml which can be used to compare stimulation with agonists or antagonists of the invention.

[1015] Parkinson Models.

[1016] The loss of motor function in Parkinson's disease is attributed to a deficiency of striatal dopamine resulting from the degeneration of the nigrostriatal dopaminergic projection neurons. An animal model for Parkinson's that has been extensively characterized involves the systemic administration of 1-methyl-4 phenyl 1,2,3,6-tetrahydropyridine (MPTP). In the CNS, MPTP is taken-up by astrocytes and catabolized by monoamine oxidase B to 1-methyl-4-phenyl pyridine (MPP⁺) and released. Subsequently, MPP⁺ is actively accumulated in dopaminergic neurons by the high-affinity reuptake transporter for dopamine. MPP⁺ is then concentrated in mitochondria by the electrochemical gradient and selectively inhibits nicotidamide adenine disphosphate: ubiquinone oxidoreductionase (complex I), thereby interfering with electron transport and eventually generating oxygen radicals.

[1017] It has been demonstrated in tissue culture paradigms that FGF-2 (basic FGF) has trophic activity towards nigral dopaminergic neurons (Ferrari et al., Dev. Biol. 1989). Recently, Dr. Unsicker's group has demonstrated that administering FGF-2 in gel foam implants in the striatum results in the near complete protection of nigral dopaminergic neurons from the toxicity associated with MPTP exposure (Otto and Unsicker, J. Neuroscience, 1990).

[1018] Based on the data with FGF-2, agonists or antagonists of the invention can be evaluated to determine whether it has an action similar to that of FGF-2 in enhancing dopaminergic neuronal survival in vitro and it can also be tested in vivo for protection of dopaminergic neurons in the striatum from the damage associated with MPTP treatment. The potential effect of an agonist or antagonist of the invention is first examined in vitro in a dopaminergic neuronal cell culture paradigm. The cultures are prepared by dissecting the midbrain floor plate from gestation day 14 Wistar rat embryos. The tissue is dissociated with trypsin and seeded at a density of 200,000 cells/cm² on polyorthinine-laminin coated glass coverslips. The cells are maintained in Dulbecco's Modified Eagle's medium and F12 medium containing hormonal supplements (N1). The cultures are fixed with paraformaldehyde after 8 days in vitro and are processed for tyrosine hydroxylase, a specific marker for dopminergic neurons, immunohistochemical staining. Dissociated cell cultures are prepared from embryonic rats. The culture medium is changed every third day and the factors are also added at that time.

[1019] Since the dopaminergic neurons are isolated from animals at gestation day 14, a developmental time which is past the stage when the dopaminergic precursor cells are proliferating, an increase in the number of tyrosine hydroxylase immunopositive neurons would represent an increase in the number of dopaminergic neurons surviving in vitro. Therefore, if an agonist or antagonist of the invention acts to prolong the survival of dopaminergic neurons, it would suggest that the agonist or antagonist may be involved in Parkinson's Disease.

[1020] The studies described in this example tested activity of agonists or antagonists of the invention. However, one skilled in the art could easily modify the exemplified studies to test the activity of polynucleotides or polypeptides of the invention (e.g., gene therapy).

### Example 25

### The Effect of Agonists or Antagonists of the Invention on the Growth of Vascular Endothelial Cells

[1021] On day 1, human umbilical vein endothelial cells (HUVEC) are seeded at 2-5×10⁴ cells/35 mm dish density in M199 medium containing 4% fetal bovine serum (FBS), 16 units/ml heparin, and 50 units/ml endothelial cell growth supplements (ECGS, Biotechnique, Inc.). On day 2, the medium is replaced with M199 containing 10% FBS, 8 units/ml heparin. An agonist or antagonist of the invention, and positive controls, such as VEGF and basic FGF (bFGF) are added, at varying concentrations. On days 4 and 6, the medium is replaced. On day 8, cell number is determined with a Coulter Counter.

[1022] An increase in the number of HUVEC cells indicates that the compound of the invention may proliferate vascular endothelial cells, while a decrease in the number of HUVEC cell indicates that the compound of the invention inhibits vascular endothelial cells.

[1023] The studies described in this example tested activity of a polypeptide of the invention. However, one skilled in the art could easily modify the exemplified studies to test the activity of polynucleotides (e.g., gene therapy), agonists, and/or antagonists of the invention.

### Example 26

### Rat Comeal Wound Healing Model

[1024] This animal model shows the effect of an agonist or antagonist of the invention on neovascularization. The experimental protocol includes:

[1025] a) Making a 1-1.5 mm long incision from the center of cornea into the stromal layer.

[1026] b) Inserting a spatula below the lip of the incision facing the outer corner of the eye.

[1027] c) Making a pocket (its base is 1-1.5 mm form the edge of the eye).

[1028] d) Positioning a pellet, containing 50 ng- 5 ug of an agonist or antagonist of the invention, within the pocket.

[1029] e) Treatment with an agonist or antagonist of the invention can also be applied topically to the corneal wounds in a dosage range of 20 mg-500 mg (daily treatment for five days).

[1030] The studies described in this example tested activity of agonists or antagonists of the invention. However, one skilled in the art could easily modify the exemplified studies to test the activity of polynucleotides or polypeptides of the invention (e.g., gene therapy).

### Example 27

### Diabetic Mouse and Glucocorticoid-Impaired Wound Healing Models

[1031] A. Diabetic db+/db+Mouse Model.

[1032] To demonstrate that an agonist or antagonist of the invention accelerates the healing process, the genetically diabetic mouse model of wound healing is used. The full thickness wound healing model in the db+/db+mouse is a well characterized, clinically relevant and reproducible model of impaired wound healing. Healing of the diabetic wound is dependent on formation of granulation tissue and re-epithelialization rather than contraction (Gartner, M. H. et al., J. Surg. Res. 52:389 (1992); Greenhalgh, D. G. et al., Am. J. Pathol. 136:1235 (1990)).

[1033] The diabetic animals have many of the characteristic features observed in Type II diabetes mellitus. Homozygous (db+/db+) mice are obese in comparison to their normal heterozygous (db+/+m) littermates. Mutant diabetic (db+/db+) mice have a single autosomal recessive mutation on chromosome 4 (db+) (Coleman et al. Proc. Natl. Acad. Sci. USA 77:283-293 (1982)). Animals show polyphagia, polydipsia and polyuria. Mutant diabetic mice (db+/db+) have elevated blood glucose, increased or normal insulin levels, and suppressed cell-mediated immunity (Mandel et al., J. Immunol. 120:1375 (1978); Debray-Sachs, M. et al., Clin. Exp. Immunol. 51(1):1-7 (1983); Leiter et al., Am. J. of Pathol. 114:46-55 (1985)). Peripheral neuropathy, myocardial complications, and microvascular lesions, basement membrane thickening and glomerular filtration abnormalities have been described in these animals (Norido, F. et al., Exp. Neurol. 83(2):221-232 (1984); Robertson et al., Diabetes 29(1):60-67 (1980); Giacomelli et al., Lab Invest. 40(4):460473 (1979); Coleman, D.L., Diabetes 31 (Suppl): 1-6 (1982)). These homozygous diabetic mice develop hyperglycemia that is resistant to insulin analogous to human type II diabetes (Mandel et al., J. Immunol. 120:1375-1377 (1978)).

[1034] The characteristics observed in these animals suggests that healing in this model may be similar to the healing observed in human diabetes (Greenhalgh, et al., Am. J. of Pathol. 136:1235-1246 (1990)).

[1035] Genetically diabetic female C57BL/KsJ (db+/db+) mice and their non-diabetic (db+/+m) heterozygous littermates are used in this study (Jackson Laboratories). The animals are purchased at 6 weeks of age and are 8 weeks old at the beginning of the study. Animals are individually housed and received food and water ad libitum. All manipulations are performed using aseptic techniques. The experiments are conducted according to the rules and guidelines of Human Genome Sciences, Inc. Institutional Animal Care and Use Committee and the Guidelines for the Care and Use of Laboratory Animals.

[1036] Wounding protocol is performed according to previously reported methods (Tsuboi, R. and Rifkin, D. B., J. Exp. Med. 172:245-251 (1990)). Briefly, on the day of wounding, animals are anesthetized with an intraperitoneal injection of Avertin (0.01 mg/mL), 2,2,2-tribromoethanol and 2-methyl-2-butanol dissolved in deionized water. The dorsal region of the animal is shaved and the skin washed with 70% ethanol solution and iodine. The surgical area is dried with sterile gauze prior to wounding. An 8 mm full-thickness wound is then created using a Keyes tissue punch. Immediately following wounding, the surrounding skin is gently stretched to eliminate wound expansion. The wounds are left open for the duration of the experiment. Application of the treatment is given topically for 5 consecutive days commencing on the day of wounding. Prior to treatment, wounds are gently cleansed with sterile saline and gauze sponges.

[1037] Wounds are visually examined and photographed at a fixed distance at the day of surgery and at two day intervals thereafter. Wound closure is determined by daily measurement on days 1-5 and on day 8. Wounds are measured horizontally and vertically using a calibrated Jameson caliper. Wounds are considered healed if granulation tissue is no longer visible and the wound is covered by a continuous epithelium.

[1038] An agonist or antagonist of the invention is administered using at a range different doses, from 4 mg to 500 mg per wound per day for 8 days in vehicle. Vehicle control groups received 50mL of vehicle solution.

[1039] Animals are euthanized on day 8 with an intraperitoneal injection of sodium pentobarbital (300 mg/kg). The wounds and surrounding skin are then harvested for histology and immunohistochemistry. Tissue specimens are placed in 10% neutral buffered formalin in tissue cassettes between biopsy sponges for further processing. Three groups of 10 animals each (5 diabetic and 5 non-diabetic controls) are evaluated: 1) Vehicle placebo control, 2) untreated group, and 3) treated group. Wound closure is analyzed by measuring the area in the vertical and horizontal axis and obtaining the total square area of the wound. Contraction is then estimated by establishing the differences between the initial wound area (day 0) and that of post treatment (day 8). The wound area on day 1 is 64mm2, the corresponding size of the dermal punch. Calculations are made using the following formula:

[Open area on day 8]−[Open area on day 1]/[Open area on day 1]

[1040] Specimens are fixed in 10% buffered formalin and paraffin embedded blocks are sectioned perpendicular to the wound surface (5mm) and cut using a Reichert-Jung microtome. Routine hematoxylin-eosin (H&E) staining is performed on cross-sections of bisected wounds. Histologic examination of the wounds are used to assess whether the healing process and the morphologic appearance of the repaired skin is altered by treatment with an agonist or antagonist of the invention. This assessment included verification of the presence of cell accumulation, inflammatory cells, capillaries, fibroblasts, re-epithelialization and epidermal maturity (Greenhalgh, D. G. et al., Am. J. Pathol. 136:1235 (1990)). A calibrated lens micrometer is used by a blinded observer.

[1041] Tissue sections are also stained immunohistochemically with a polyclonal rabbit anti-human keratin antibody using ABC Elite detection system. Human skin is used as a positive tissue control while non-immune IgG is used as a negative control. Keratinocyte growth is determined by evaluating the extent of reepithelialization of the wound using a calibrated lens micrometer.

[1042] Proliferating cell nuclear antigen/cyclin (PCNA) in skin specimens is demonstrated by using anti-PCNA antibody (1:50) with an ABC Elite detection system. Human colon cancer served as a positive tissue control and human brain tissue is used as a negative tissue control. Each specimen included a section with omission of the primary antibody and substitution with non-immune mouse IgG. Ranking of these sections is based on the extent of proliferation on a scale of 0-8, the lower side of the scale reflecting slight proliferation to the higher side reflecting intense proliferation.

[1043] Experimental data are analyzed using an unpaired t test. A p value of <0.05 is considered significant.

[1044] B. Steroid Impaired Rat Model

[1045] The inhibition of wound healing by steroids has been well documented in various in vitro and in vivo systems (Wahl, Glucocorticoids and Wound healing. In: Anti-Inflammatory Steroid Action: Basic and Clinical Aspects. 280-302 (1989); Wahlet al., J. Immunol. 115: 476-481 (1975); Werb et al., J. Exp. Med. 147:1684-1694 (1978)). Glucocorticoids retard wound healing by inhibiting angiogenesis, decreasing vascular permeability (Ebert et al., An. Intern. Med. 37:701-705 (1952)), fibroblast proliferation, and collagen synthesis (Beck et al., Growth Factors. 5: 295-304 (1991); Haynes et al., J. Clin. Invest. 61: 703-797 (1978)) and producing a transient reduction of circulating monocytes (Haynes et al., J. Clin. Invest. 61: 703-797 (1978); Wahl, “Glucocorticoids and wound healing”, In: Antiinflammatory Steroid Action: Basic and Clinical Aspects, Academic Press, New York, pp. 280-302 (1989)). The systemic administration of steroids to impaired wound healing is a well establish phenomenon in rats (Beck et al., Growth Factors. 5: 295-304 (1991); Haynes et al., J. Clin. Invest. 61: 703-797 (1978); Wahl, “Glucocorticoids and wound healing”, In: Antiinflammatory Steroid Action: Basic and Clinical Aspects, Academic Press, New York, pp. 280-302 (1989); Pierce et al., Proc. Natl. Acad. Sci. USA 86: 2229-2233 (1989)).

[1046] To demonstrate that an agonist or antagonist of the invention can accelerate the healing process, the effects of multiple topical applications of the agonist or antagonist on full thickness excisional skin wounds in rats in which healing has been impaired by the systemic administration of methylprednisolone is assessed.

[1047] Young adult male Sprague Dawley rats weighing 250-300 g (Charles River Laboratories) are used in this example. The animals are purchased at 8 weeks of age and are 9 weeks old at the beginning of the study. The healing response of rats is impaired by the systemic administration of methylprednisolone (17 mg/kg/rat intramuscularly) at the time of wounding. Animals are individually housed and received food and water ad libitum. All manipulations are performed using aseptic techniques. This study is conducted according to the rules and guidelines of Human Genome Sciences, Inc. Institutional Animal Care and Use Committee and the Guidelines for the Care and Use of Laboratory Animals.

[1048] The wounding protocol is followed according to section A, above. On the day of wounding, animals are anesthetized with an intramuscular injection of ketamine (50 mg/kg) and xylazine (5 mg/kg). The dorsal region of the animal is shaved and the skin washed with 70% ethanol and iodine solutions. The surgical area is dried with sterile gauze prior to wounding. An 8 mm full-thickness wound is created using a Keyes tissue punch. The wounds are left open for the duration of the experiment. Applications of the testing materials are given topically once a day for 7 consecutive days commencing on the day of wounding and subsequent to methylprednisolone administration. Prior to treatment, wounds are gently cleansed with sterile saline and gauze sponges.

[1049] Wounds are visually examined and photographed at a fixed distance at the day of wounding and at the end of treatment. Wound closure is determined by daily measurement on days 1-5 and on day 8. Wounds are measured horizontally and vertically using a calibrated Jameson caliper. Wounds are considered healed if granulation tissue is no longer visible and the wound is covered by a continuous epithelium.

[1050] The agonist or antagonist of the invention is administered using at a range different doses, from 4 mg to 500 mg per wound per day for 8 days in vehicle. Vehicle control groups received 50 mL of vehicle solution.

[1051] Animals are euthanized on day 8 with an intraperitoneal injection of sodium pentobarbital (300 mg/kg). The wounds and surrounding skin are then harvested for histology. Tissue specimens are placed in 10% neutral buffered formalin in tissue cassettes between biopsy sponges for further processing.

[1052] Four groups of 10 animals each (5 with methylprednisolone and 5 without glucocorticoid) are evaluated: 1) Untreated group 2) Vehicle placebo control 3) treated groups.

[1053] Wound closure is analyzed by measuring the area in the vertical and horizontal axis and obtaining the total area of the wound. Closure is then estimated by establishing the differences between the initial wound area (day 0) and that of post treatment (day 8). The wound area on day 1 is 64mm², the corresponding size of the dermal punch. Calculations are made using the following formula:

[Open area on day 8]−[Open area on day 1]/[Open area on day 1]

[1054] Specimens are fixed in 10% buffered formalin and paraffin embedded blocks are sectioned perpendicular to the wound surface (5mm) and cut using an Olympus microtome. Routine hematoxylin-eosin (H&E) staining is performed on cross-sections of bisected wounds. Histologic examination of the wounds allows assessment of whether the healing process and the morphologic appearance of the repaired skin is improved by treatment with an agonist or antagonist of the invention. A calibrated lens micrometer is used by a blinded observer to determine the distance of the wound gap.

[1055] Experimental data are analyzed using an unpaired t test. A p value of <0.05 is considered significant.

[1056] The studies described in this example tested activity of agonists or antagonists of the invention. However, one skilled in the art could easily modify the exemplified studies to test the activity of polynucleotides or polypeptides of the invention (e.g., gene therapy).

### Example 28

### Lymphadema Animal Model

[1057] The purpose of this experimental approach is to create an appropriate and consistent lymphedema model for testing the therapeutic effects of an agonist or antagonist of the invention in lymphangiogenesis and re-establishment of the lymphatic circulatory system in the rat hind limb. Effectiveness is measured by swelling volume of the affected limb, quantification of the amount of lymphatic vasculature, total blood plasma protein, and histopathology. Acute lymphedema is observed for 7-10 days. Perhaps more importantly, the chronic progress of the edema is followed for up to 3-4 weeks.

[1058] Prior to beginning surgery, blood sample is drawn for protein concentration analysis. Male rats weighing approximately ˜350g are dosed with Pentobarbital. Subsequently, the right legs are shaved from knee to hip. The shaved area is swabbed with gauze soaked in 70% EtOH. Blood is drawn for serum total protein testing. Circumference and volumetric measurements are made prior to injecting dye into paws after marking 2 measurement levels (0.5 cm above heel, at mid-pt of dorsal paw). The intradermal dorsum of both right and left paws are injected with 0.05 ml of 1% Evan's Blue. Circumference and volumetric measurements are then made following injection of dye into paws.

[1059] Using the knee joint as a landmark, a mid-leg inguinal incision is made circumferentially allowing the femoral vessels to be located. Forceps and hemostats are used to dissect and separate the skin flaps. After locating the femoral vessels, the lymphatic vessel that runs along side and underneath the vessel(s) is located. The main lymphatic vessels in this area are then electrically coagulated or suture ligated.

[1060] Using a microscope, muscles in back of the leg (near the semitendinosis and adductors) are bluntly dissected. The popliteal lymph node is then located. The 2 proximal and 2 distal lymphatic vessels and distal blood supply of the popliteal node are then and ligated by suturing. The popliteal lymph node, and any accompanying adipose tissue, is then removed by cutting connective tissues.

[1061] Care is taken to control any mild bleeding resulting from this procedure. After lymphatics are occluded, the skin flaps are sealed by using liquid skin (Vetbond) (AJ Buck). The separated skin edges are sealed to the underlying muscle tissue while leaving a gap of ˜0.5 cm around the leg. Skin also may be anchored by suturing to underlying muscle when necessary.

[1062] To avoid infection, animals are housed individually with mesh (no bedding). Recovering animals are checked daily through the optimal edematous peak, which typically occurred by day 5-7. The plateau edematous peak are then observed. To evaluate the intensity of the lymphedema, the circumference and volumes of 2 designated places on each paw before operation and daily for 7 days are measured. The effect plasma proteins on lymphedema is determined and whether protein analysis is a useful testing perimeter is also investigated. The weights of both control and edematous limbs are evaluated at 2 places. Analysis is performed in a blind manner.

[1063] Circumference Measurements: Under brief gas anesthetic to prevent limb movement, a cloth tape is used to measure limb circumference. Measurements are done at the ankle bone and dorsal paw by 2 different people then those 2 readings are averaged. Readings are taken from both control and edematous limbs.

### The Effect of Agonists or Antagonists of the Invention on the Growth of

[1064] Volumetric Measurements: On the day of surgery, animals are anesthetized with Pentobarbital and are tested prior to surgery. For daily volumetrics animals are under brief halothane anesthetic (rapid immobilization and quick recovery), both legs are shaved and equally marked using waterproof marker on legs. Legs are first dipped in water, then dipped into instrument to each marked level then measured by Buxco edema software(Chen/Victor). Data is recorded by one person, while the other is dipping the limb to marked area.

[1065] Blood-plasma protein measurements: Blood is drawn, spun, and serum separated prior to surgery and then at conclusion for total protein and Ca2+ comparison.

[1066] Limb Weight Comparison: After drawing blood, the animal is prepared for tissue collection. The limbs are amputated using a quillitine, then both experimental and control legs are cut at the ligature and weighed. A second weighing is done as the tibio-cacaneal joint is disarticulated and the foot is weighed.

[1067] Histological Preparations: The transverse muscle located behind the knee (popliteal) area is dissected and arranged in a metal mold, filled with freezeGel, dipped into cold methylbutane, placed into labeled sample bags at - 80EC until sectioning. Upon sectioning, the muscle is observed under fluorescent microscopy for lymphatics.

[1068] The studies described in this example tested activity of agonists or antagonists of the invention. However, one skilled in the art could easily modify the exemplified studies to test the activity of polynucleotides or polypeptides of the invention (e.g., gene therapy).

### Example 29

### Suppression of TNF alpha-induced adhesion molecule expression by a Agonist or Antagonist of the Invention

[1069] The recruitment of lymphocytes to areas of inflammation and angiogenesis involves specific receptor-ligand interactions between cell surface adhesion molecules (CAMs) on lymphocytes and the vascular endothelium. The adhesion process, in both normal and pathological settings, follows a multi-step cascade that involves intercellular adhesion molecule-1 (ICAM-1), vascular cell adhesion molecule-1 (VCAM-1), and endothelial leukocyte adhesion molecule-1 (E-selectin) expression on endothelial cells (EC). The expression of these molecules and others on the vascular endothelium determines the efficiency with which leukocytes may adhere to the local vasculature and extravasate into the local tissue during the development of an inflammatory response. The local concentration of cytokines and growth factor participate in the modulation of the expression of these CAMs.

[1070] Tumor necrosis factor alpha (TNF-a), a potent proinflammatory cytokine, is a stimulator of all three CAMs on endothelial cells and may be involved in a wide variety of inflammatory responses, often resulting in a pathological outcome. The potential of an agonist or antagonist of the invention to mediate a suppression of TNF-a induced CAM expression can be examined. A modified ELISA assay which uses ECs as a solid phase absorbent is employed to measure the amount of CAM expression on TNF-a treated ECs when co-stimulated with a member of the FGF family of proteins.

[1071] To perform the experiment, human umbilical vein endothelial cell (HUVEC) cultures are obtained from pooled cord harvests and maintained in growth medium (EGM-2; Clonetics, San Diego, Calif.) supplemented with 10% FCS and 1% penicillin/streptomycin in a 37 degree C. humidified incubator containing 5% C02. HUVECs are seeded in 96-well plates at concentrations of 1×10⁴ cells/well in EGM medium at 37 degree C. for 18-24 hrs or until confluent. The monolayers are subsequently washed 3 times with a serum-free solution of RPMI-1640 supplemented with 100 U/ml penicillin and 100 mg/ml streptomycin, and treated with a given cytokine and/or growth factor(s) for 24 h at 37 degree C. Following incubation, the cells are then evaluated for CAM expression.

[1072] Human Umbilical Vein Endothelial cells (HUVECs) are grown in a standard 96 well plate to confluence. Growth medium is removed from the cells and replaced with 90 ul of 199 Medium (10% FBS). Samples for testing and positive or negative controls are added to the plate in triplicate (in 10 ul volumes). Plates are incubated at 37 degree C for either 5 h (selectin and integrin expression) or 24 h (integrin expression only). Plates are aspirated to remove medium and 100 μl of 0.1% paraformaldehyde-PBS(with Ca++ and Mg++) is added to each well. Plates are held at 4° C. for 30 min.

[1073] Fixative is then removed from the wells and wells are washed 1× with PBS(+Ca,Mg)+0.5% BSA and drained. Do not allow the wells to dry. Add 10 μl of diluted primary antibody to the test and control wells. Anti-ICAM-1-Biotin, Anti-VCAM-1-Biotin and Anti-E-selectin-Biotin are used at a concentration of 10 μg/ml (1:10 dilution of 0.1 mg/ml stock antibody). Cells are incubated at 37° C. for 30 min. in a humidified environment. Wells are washed X3 with PBS(+Ca,Mg)+0.5% BSA.

[1074] Then add 20 μl of diluted ExtrAvidin-Alkaline Phosphotase (1:5,000 dilution) to each well and incubated at 37° C. for 30 min. Wells are washed X3 with PBS(+Ca,Mg)+0.5% BSA. 1 tablet of p-Nitrophenol Phosphate pNPP is dissolved in 5 ml of glycine buffer (pH 10.4). 100 μl of pNPP substrate in glycine buffer is added to each test well. Standard wells in triplicate are prepared from the working dilution of the ExtrAvidin-Alkaline Phosphotase in glycine buffer: 1:5,000 (10⁰)>10^{-0.5}>10⁻¹>10^{-1.5}. 5 μl of each dilution is added to triplicate wells and the resulting AP content in each well is 5.50 ng, 1.74 ng, 0.55 ng, 0.18 ng. 100 μl of pNNP reagent must then be added to each of the standard wells. The plate must be incubated at 37° C. for 4h. A volume of 50 μl of 3M NaOH is added to all wells. The results are quantified on a plate reader at 405 nm. The background subtraction option is used on blank wells filled with glycine buffer only. The template is set up to indicate the concentration of AP-conjugate in each standard well [5.50 ng; 1.74 ng; 0.55 ng; 0.18 ng]. Results are indicated as amount of bound AP-conjugate in each sample.

[1075] The studies described in this example tested activity of agonists or antagonists of the invention. However, one skilled in the art could easily modify the exemplified studies to test the activity of polynucleotides or polypeptides of the invention (e.g., gene therapy).

### Example 30

### Production Of Polypeptide of the Invention For High-Throughput Screening Assays

[1076] The following protocol produces a supernatant containing polypeptide of the present invention to be tested. This supernatant can then be used in the Screening Assays described in Examples 32-41.

[1077] First, dilute Poly-D-Lysine (644 587 Boehringer-Mannheim) stock solution (lmg/ml in PBS) 1:20 in PBS (w/o calcium or magnesium 17-516F Biowhittaker) for a working solution of 50ug/ml. Add 200 ul of this solution to each well (24 well plates) and incubate at RT for 20 minutes. Be sure to distribute the solution over each well (note: a 12-channel pipetter may be used with tips on every other channel). Aspirate off the Poly-D-Lysine solution and rinse with Iml PBS (Phosphate Buffered Saline). The PBS should remain in the well until just prior to plating the cells and plates may be poly-lysine coated in advance for up to two weeks.

[1078] Plate 293T cells (do not carry cells past P+20) at 2×10⁵ cells/well in 0.5ml DMEM(Dulbecco's Modified Eagle Medium)(with 4.5 G/L glucose and L-glutamine (12-604F Biowhittaker))/10% heat inactivated FBS(14-503F Biowhittaker)/1× Penstrep(17-602E Biowhittaker). Let the cells grow overnight.

[1079] The next day, mix together in a sterile solution basin: 300 ul Lipofectamine (18324-012 Gibco/BRL) and 5ml Optimem I (31985070 Gibco/BRL)/96-well plate. With a small volume multi-channel pipetter, aliquot approximately 2ug of an expression vector containing a polynucleotide insert, produced by the methods described in Examples 8-10, into an appropriately labeled 96-well round bottom plate. With a multi-channel pipetter, add 50 ul of the Lipofectamine/Optimem I mixture to each well. Pipette up and down gently to mix. Incubate at RT 15-45 minutes. After about 20 minutes, use a multi-channel pipetter to add 150 ul Optimem I to each well. As a control, one plate of vector DNA lacking an insert should be transfected with each set of transfections.

[1080] Preferably, the transfection should be performed by tag-teaming the following tasks. By tag-teaming, hands on time is cut in half, and the cells do not spend too much time on PBS. First, person A aspirates off the media from four 24-well plates of cells, and then person B rinses each well with 0.5-1 ml PBS. Person A then aspirates off PBS rinse, and person B, using al2-channel pipetter with tips on every other channel, adds the 200 ul of DNA/Lipofectamine/Optimem I complex to the odd wells first, then to the even wells, to each row on the 24-well plates. Incubate at 37 degree C. for 6 hours.

[1081] While cells are incubating, prepare appropriate media, either 1%BSA in DMEM with 1× penstrep, or HGS CHO-5 media (116.6 mg/L of CaCI2 (anhyd); 0.00130 mg/L CuSO₄-5H_{26l O;} 0.050 mg/L of Fe(NO₃)₃-9H₂O; 0.417 mg/L of FeSO₄-7H₂O; 311.80 mg/L of Kcl; 28.64 mg/L of MgCl₂; 48.84 mg/L of MgSO₄; 6995.50 mg/L of NaCl; 2400.0 mg/L of NaHCO₃; 62.50 mg/L of NaH₂PO₄-H₂O; 71.02 mg/L of Na₂HPO₄; 0.4320 mg/L of ZnSO₄-7H₂O; 0.002 mg/L of Arachidonic Acid; 1.022 mg/L of Cholesterol; 0.070 mg/L of DL-alpha-Tocopherol-Acetate; 0.0520 mg/L of Linoleic Acid; 0.010 mg/L of Linolenic Acid; 0.010 mg/L of Myristic Acid; 0.010 mg/L of Oleic Acid; 0.010 mg/L of Palmitric Acid; 0.010 mg/L of Palmitic Acid; 100 mg/L of Pluronic F-68; 0.010 mg/L of Stearic Acid; 2.20 mg/L of Tween 80; 4551 mg/L of D-Glucose; 130.85 mg/ml of L-Alanine; 147.50 mg/ml of L-Arginine-HCL; 7.50 mg/ml of L-Asparagine-H₂O; 6.65 mg/ml of L-Aspartic Acid; 29.56 mg/ml of L-Cystine-2HCL-H₂O; 31.29 mg/ml of L-Cystine-2HCL; 7.35 mg/ml of L-Glutamic Acid; 365.0 mg/ml of L-Glutamine; 18.75 mg/ml of Glycine; 52.48 mg/ml of L-Histidine-HCL-H₂O; 106.97 mg/ml of L-Isoleucine; 111.45 mg/ml of L-Leucine; 163.75 mg/ml of L-Lysine HCL; 32.34 mg/ml of L-Methionine; 68.48 mg/ml of L-Phenylalainine; 40.0 mg/ml of L-Proline; 26.25 mg/ml of L-Serine; 101.05 mg/ml of L-Threonine; 19.22 mg/ml of L-Tryptophan; 91.79 mg/ml of L-Tryrosine-2Na-2H₂O; and 99.65 mg/ml of L-Valine; 0.0035 mg/L of Biotin; 3.24 mg/L of D-Ca Pantothenate; 11.78 mg/L of Choline Chloride; 4.65 mg/L of Folic Acid; 15.60 mg/L of i-Inositol; 3.02 mg/L of Niacinamide; 3.00 mg/L of Pyridoxal HCL; 0.031 mg/L of Pyridoxine HCL; 0.319 mg/L of Riboflavin; 3.17 mg/L of Thiamine HCL; 0.365 mg/L of Thymidine; 0.680 mg/L of Vitamin B₁₂; 25 mM of HEPES Buffer; 2.39 mg/L of Na Hypoxanthine; 0.105 mg/L of Lipoic Acid; 0.081 mg/L of Sodium Putrescine-2HCL; 55.0 mg/L of Sodium Pyruvate; 0.0067 mg/L of Sodium Selenite; 20 uM of Ethanolamine; 0.122 mg/L of Ferric Citrate; 41.70 mg/L of Methyl-B-Cyclodextrin complexed with Linoleic Acid; 33.33 mg/L of Methyl-B-Cyclodextrin complexed with Oleic Acid; 10 mg/L of Methyl-B-Cyclodextrin complexed with Retinal Acetate. Adjust osmolarity to 327 mOsm) with 2 mm glutamine and 1× penstrep. (BSA (81-068-3 Bayer) 100 gm dissolved in 1L DMEM for a 10% BSA stock solution). Filter the media and collect 50 ul for endotoxin assay in 15 ml polystyrene conical.

[1082] The transfection reaction is terminated, preferably by tag-teaming, at the end of the incubation period. Person A aspirates off the transfection media, while person B adds 1.5ml appropriate media to each well. Incubate at 37 degree C. for 45 or 72 hours depending on the media used: 1%BSA for 45 hours or CHO-5 for 72 hours.

[1083] On day four, using a 300 ul multichannel pipetter, aliquot 600 ul in one 1 ml deep well plate and the remaining supernatant into a 2 ml deep well. The supernatants from each well can then be used in the assays described in Examples 32-39.

[1084] It is specifically understood that when activity is obtained in any of the assays described below using a supernatant, the activity originates from either the polypeptide of the present invention directly (e.g., as a secreted protein) or by polypeptide of the present invention inducing expression of other proteins, which are then secreted into the supernatant. Thus, the invention further provides a method of identifying the protein in the supernatant characterized by an activity in a particular assay.

### Example 31

### Construction of GAS Reporter Construct

[1085] One signal transduction pathway involved in the differentiation and proliferation of cells is called the Jaks-STATs pathway. Activated proteins in the Jaks-STATs pathway bind to gamma activation site “GAS” elements or interferon-sensitive responsive element (“ISRE”), located in the promoter of many genes. The binding of a protein to these elements alter the expression of the associated gene.

[1086] GAS and ISRE elements are recognized by a class of transcription factors called Signal Transducers and Activators of Transcription, or “STATs.” There are six members of the STATs family. Stat1 and Stat3 are present in many cell types, as is Stat2 (as response to IFN-alpha is widespread). Stat4 is more restricted and is not in many cell types though it has been found in T helper class I, cells after treatment with IL-12. Stat5 was originally called mammary growth factor, but has been found at higher concentrations in other cells including myeloid cells. It can be activated in tissue culture cells by many cytokines.

[1087] The STATs are activated to translocate from the cytoplasm to the nucleus upon tyrosine phosphorylation by a set of kinases known as the Janus Kinase (“Jaks”) family. Jaks represent a distinct family of soluble tyrosine kinases and include Tyk2, Jak1, Jak2, and Jak3. These kinases display significant sequence similarity and are generally catalytically inactive in resting cells.

[1088] The Jaks are activated by a wide range of receptors summarized in the Table below. (Adapted from review by Schidler and Darnell, Ann. Rev. Biochem. 64:621-51 (1995).) A cytokine receptor family, capable of activating Jaks, is divided into two groups: (a) Class 1 includes receptors for IL-2, IL-3, IL-4, IL-6, IL-7, IL-9, IL-11, IL-12, IL-15, Epo, PRL, GH, G-CSF, GM-CSF, LIF, CNTF, and thrombopoietin; and (b) Class 2 includes IFN-a, IFN-g, and IL-10. The Class 1 receptors share a conserved cysteine motif (a set of four conserved cysteines and one tryptophan) and a WSXWS motif (a membrane proximal region encoding Trp-Ser-Xxx-Trp-Ser (SEQ ID NO:1548)).

[1089] Thus, on binding of a ligand to a receptor, Jaks are activated, which in turn activate STATs, which then translocate and bind to GAS elements. This entire process is encompassed in the Jaks-STATs signal transduction pathway.

[1090] Therefore, activation of the Jaks-STATs pathway, reflected by the binding of the GAS or the ISRE element, can be used to indicate proteins involved in the proliferation and differentiation of cells. For example, growth factors and cytokines are known to activate the Jaks-STATs pathway. (See Table below.) Thus, by using GAS elements linked to reporter molecules, activators of the Jaks-STATs pathway can be identified.

| | | JAKs | | | | |
|---|---|---|---|---|---|---|
| Ligand | tyk2 | Jak1 | Jak2 | Jak3 | STATS GAS(elements) or ISRE | |
| IFN family | | | | | | |
| IFN-α/β | + | + | − | − | 1,2,3 | ISRE |
| IFN-g | | + | + | − | 1 | GAS(IRF1>Lys6>IFP) |
| II-10 | + | ? | ? | − | 1,3 | |
| gp130 family | | | | | | |
| IL-6(Pleiotrohic) | + | + | + | ? | 1,3 | GAS(IRF1>Lys6>IFP) |
| II-11(Pleiotrohic) | ? | + | ? | ? | 1,3 | |
| OnM(Pleiotrohic) | ? | + | + | ? | 1,3 | |
| LIF(Pleiotrohic) | ? | + | + | ? | 1,3 | |
| CNTF(Pleiotrohic) | −/+ | + | + | ? | 1,3 | |
| G-CSF(Pleiotrohic) | ? | + | ? | ? | 1,3 | |
| IL-12(Pleiotrohic) | + | − | + | + | 1,3 | |
| g-C family | | | | | | |
| IL-2(lymphocytes) | − | + | − | + | 1,3,5 | GAS |
| IL-4(lymph/myeloid) | − | + | − | + | 6 | GAS(IRF1 = IFP |
| >>Ly6)(IgH) | | | | | | |
| IL-7(lymphocytes) | − | + | − | + | 5 | GAS |
| IL-9(lymphocytes) | − | + | − | + | 5 | GAS |
| IL-13(lymphocyte) − | + | ? | ? | 6 | GAS | |
| IL-15 | ? | + | ? | + | 5 | GAS |
| gp140 family | | | | | | |
| IL-3(myeloid) | − | − | + | − | 5 | GAS(IRF>IFP>>Ly6) |
| IL-5(myeloid) | − | − | + | − | 5 | GAS |
| GM-CSF (myeloid) | − | − | + | − | 5 | GAS |
| Growth hormone family | | | | | | |
| GH | ? | − | + | − | 5 | |
| PRL | ? | +/− | + | − | 1,3,5 | |
| EPO | ? | − | + | − | 5 | GAS(B− |
| | | | | | | CAS>IRF1= |
| | | | | | | IFP>>Ly6) |
| Receptor Tyrosine Kinases | | | | | | |
| EGF | ? | + | + | − | 1,3 | GAS(IRF1) |
| PDGF | ? | + | + | − | 1,3 | |
| CSF-1 | ? | + | + | − | 1,3 | GAS (not IRF1) |

[1091] To construct a synthetic GAS containing promoter element, which is used in the Biological Assays described in Examples 32-33, a PCR based strategy is employed to generate a GAS-SV40 promoter sequence. The 5′ primer contains four tandem copies of the GAS binding site found in the IRFI promoter and previously demonstrated to bind STATs upon induction with a range of cytokines (Rothman et al., Immunity 1:457-468 (1994).), although other GAS or ISRE elements can be used instead. The 5′ primer also contains 18bp of sequence complementary to the SV40 early promoter sequence and is flanked with an XhoI site. The sequence of the 5′ primer is: 5′ :GCGCCTCGAGATTTCCCCGAAATCTAGATTTCCCCGAAATGATTTCCCCGAA ATGATTTCCCCGAAATATCTGCCATCTCAATTAG:3′ (SEQ ID NO: 1549).

[1092] The downstream primer is complementary to the SV40 promoter and is flanked with a Hind III site: 5′:GCGGCAAGCTTTTTGCAAAGCCTAGGC:3′ (SEQ ID NO: 1550).

[1093] PCR amplification is performed using the SV40 promoter template present in the B-gal:promoter plasmid obtained from Clontech. The resulting PCR fragment is digested with XhoI/Hind III and subcloned into BLSK2-. (Stratagene.) Sequencing with forward and reverse primers confirms that the insert contains the following sequence: 5′:CTCGAGATTTCCCCGAAATCTAGATTTCCCCGAAATGATTTCCCCGAAATGA TTTCCCCGAAATATCTGCCATCTCAATTAGTCAGCAACCATAGTCCCGCCCCTA ACTCCGCCCATCCCGCCCCTAACTCCGCCCAGTTCCGCCCATTCTCCGCCCCAT GGCTGACTAATTTTTTTTATTTATGCAGAGGCCGAGGCCGCCTCGGCCTCTGAG CTATTCCAGAAGTAGTGAGGAGGCTTTTTTGGAGGCCTAGGCTTTTGCAAAAAGCTT:3′ (SEQ ID NO:1551).

[1094] With this GAS promoter element linked to the SV40 promoter, a GAS:SEAP2 reporter construct is next engineered. Here, the reporter molecule is a secreted alkaline phosphatase, or “SEAP.” Clearly, however, any reporter molecule can be instead of SEAP, in this or in any of the other Examples. Well known reporter molecules that can be used instead of SEAP include chloramphenicol acetyltransferase (CAT), luciferase, alkaline phosphatase, B-galactosidase, green fluorescent protein (GFP), or any protein detectable by an antibody.

[1095] The above sequence confirmed synthetic GAS-SV40 promoter element is subcloned into the pSEAP-Promoter vector obtained from Clontech using HindIII and XhoI, effectively replacing the SV40 promoter with the amplified GAS:SV40 promoter element, to create the GAS-SEAP vector. However, this vector does not contain a neomycin resistance gene, and therefore, is not preferred for mammalian expression systems.

[1096] Thus, in order to generate mammalian stable cell lines expressing the GAS-SEAP reporter, the GAS-SEAP cassette is removed from the GAS-SEAP vector using SalI and NotI, and inserted into a backbone vector containing the neomycin resistance gene, such as pGFP-1 (Clontech), using these restriction sites in the multiple cloning site, to create the GAS-SEAP/Neo vector. Once this vector is transfected into mammalian cells, this vector can then be used as a reporter molecule for GAS binding as described in Examples 32-33.

[1097] Other constructs can be made using the above description and replacing GAS with a different promoter sequence. For example, construction of reporter molecules containing NFK-B and EGR promoter sequences are described in Examples 35 and 36. However, many other promoters can be substituted using the protocols described in these Examples. For instance, SRE, IL-2, NFAT, or Osteocalcin promoters can be substituted, alone or in combination (e.g., GAS/NF-KB/EGR, GAS/NF-KB, Il-2/NFAT, or NF-KB/GAS). Similarly, other cell lines can be used to test reporter construct activity, such as HELA (epithelial), HUVEC (endothelial), Reh (B-cell), Saos-2 (osteoblast), HUVEC (aortic), or Cardiomyocyte.

### Example 32

### High-Throughput Screening Assay for T-cell Activity.

[1098] The following protocol is used to assess T-cell activity by identifying factors, and determining whether supemate containing a polypeptide of the invention proliferates and/or differentiates T-cells. T-cell activity is assessed using the GAS/SEAP/Neo construct produced in Example 31. Thus, factors that increase SEAP activity indicate the ability to activate the Jaks-STATS signal transduction pathway. The T-cell used in this assay is Jurkat T-cells (ATCC Accession No. TIB-152), although Molt-3 cells (ATCC Accession No. CRL-1552) and Molt-4 cells (ATCC Accession No. CRL-1582) cells can also be used.

[1099] Jurkat T-cells are lymphoblastic CD4+Thl helper cells. In order to generate stable cell lines, approximately 2 million Jurkat cells are transfected with the GAS-SEAP/neo vector using DMRIE-C (Life Technologies)(transfection procedure described below). The transfected cells are seeded to a density of approximately 20,000 cells per well and transfectants resistant to 1 mg/ml genticin selected. Resistant colonies are expanded and then tested for their response to increasing concentrations of interferon gamma. The dose response of a selected clone is demonstrated.

[1100] Specifically, the following protocol will yield sufficient cells for 75 wells containing 200 ul of cells. Thus, it is either scaled up, or performed in multiple to generate sufficient cells for multiple 96 well plates. Jurkat cells are maintained in RPMI +10% serum with 1%Pen-Strep. Combine 2.5 mls of OPTI-MEM (Life Technologies) with 10 ug of plasmid DNA in a T25 flask. Add 2.5 ml OPTI-MEM containing 50 ul of DMRIE-C and incubate at room temperature for 15-45 mins.

[1101] During the incubation period, count cell concentration, spin down the required number of cells (10⁷ per transfection), and resuspend in OPTI-MEM to a final concentration of 10⁷ cells/ml. Then add 1 ml of 1×10⁷ cells in OPTI-MEM to T25 flask and incubate at 37 degree C. for 6 hrs. After the incubation, add 10 ml of RPMI+15% serum.

[1102] The Jurkat:GAS-SEAP stable reporter lines are maintained in RPMI+10% serum, 1 mg/ml Genticin, and 1% Pen-Strep. These cells are treated with supernatants containing polypeptide of the present invention or polypeptide of the present invention induced polypeptides as produced by the protocol described in Example 30.

[1103] On the day of treatment with the supernatant, the cells should be washed and resuspended in fresh RPMI+10% serum to a density of 500,000 cells per ml. The exact number of cells required will depend on the number of supernatants being screened. For one 96 well plate, approximately 10 million cells (for 10 plates, 100 million cells) are required.

[1104] Transfer the cells to a triangular reservoir boat, in order to dispense the cells into a 96 well dish, using a 12 channel pipette. Using a 12 channel pipette, transfer 200 ul of cells into each well (therefore adding 100, 000 cells per well).

[1105] all the plates have been seeded, 50 ul of the supernatants are transferred directly from the 96 well plate containing the supernatants into each well using a 12 channel pipette. In addition, a dose of exogenous interferon gamma (0.1, 1.0, 10 ng) is added to wells H9, H10, and H11 to serve as additional positive controls for the assay.

[1106] The 96 well dishes containing Jurkat cells treated with supernatants are placed in an incubator for 48 hrs (note: this time is variable between 48-72 hrs). 35 ul samples from each well are then transferred to an opaque 96 well plate using a 12 channel pipette. The opaque plates should be covered (using sellophene covers) and stored at -20 degree C. until SEAP assays are performed according to Example 36. The plates containing the remaining treated cells are placed at 4 degree C and serve as a source of material for repeating the assay on a specific well if desired.

[1107] As a positive control, 100 Unit/ml interferon gamma can be used which is known to activate Jurkat T cells. Over 30 fold induction is typically observed in the positive control wells.

[1108] The above protocol may be used in the generation of both transient, as well as, stable transfected cells, which would be apparent to those of skill in the art.

### Example 34

### High-Throughput Screening Assay Identifying Myeloid Activity

[1109] The following protocol is used to assess myeloid activity of polypeptide of the present invention by determining whether polypeptide of the present invention proliferates and/or differentiates myeloid cells. Myeloid cell activity is assessed using the GAS/SEAP/Neo construct produced in Example 32. Thus, factors that increase SEAP activity indicate the ability to activate the Jaks-STATS signal transduction pathway. The myeloid cell used in this assay is U937, a pre-monocyte cell line, although TF-1, HL60, or KG1 can be used.

[1110] To transiently transfect U937 cells with the GAS/SEAP/Neo construct produced in Example 32, a DEAE-Dextran method (Kharbanda et. al., 1994, Cell Growth & Differentiation, 5:259-265) is used. First, harvest 2xlOe⁷ U937 cells and wash with PBS. The U937 cells are usually grown in RPMI 1640 medium containing 10% heat-inactivated fetal bovine serum (FBS) supplemented with 100 units/ml penicillin and 100 mg/ml streptomycin.

[1111] Next, suspend the cells in 1 ml of 20 mM Tris-HCl (pH 7.4) buffer containing 0.5 mg/ml DEAE-Dextran, 8 ug GAS-SEAP2 plasmid DNA, 140 mM NaCl, 5 mM KCl, 375 uM Na₂HPO₄.7H₂O, 1 mM MgCl₂, and 675 uM CaCl₂. Incubate at 37 degrees C. for 45 min.

[1112] Wash the cells with RPMI 1640 medium containing 10% FBS and then resuspend in 10 ml complete medium and incubate at 37 degree C. for 36 hr.

[1113] The GAS-SEAP/U937 stable cells are obtained by growing the cells in 400 ug/ml G418. The G418-free medium is used for routine growth but every one to two months, the cells should be re-grown in 400 ug/ml G418 for couple of passages.

[1114] These cells are tested by harvesting 1×10⁸ cells (this is enough for ten 96-well plates assay) and wash with PBS. Suspend the cells in 200 ml above described growth medium, with a final density of 5×10⁵ cells/ml. Plate 200 ul cells per well in the 96-well plate (or 1×10⁵ cells/well).

[1115] Add 50 ul of the supernatant prepared by the protocol described in Example 30. Incubate at 37 degee C. for 48 to 72 hr. As a positive control, 100 Unit/ml interferon gamma can be used which is known to activate U937 cells. Over 30 fold induction is typically observed in the positive control wells. SEAP assay the supernatant according to the protocol described in Example 36.

### Example 34

### High-Throughput Screening Assay Identifying Neuronal Activity.

[1116] When cells undergo differentiation and proliferation, a group of genes are activated through many different signal transduction pathways. One of these genes, EGR1 (early growth response gene 1), is induced in various tissues and cell types upon activation. The promoter of EGR1 is responsible for such induction. Using the EGR1 promoter linked to reporter molecules, activation of cells can be assessed by polypeptide of the present invention.

[1117] Particularly, the following protocol is used to assess neuronal activity in PC12 cell lines. PC12 cells (rat phenochromocytoma cells) are known to proliferate and/or differentiate by activation with a number of mitogens, such as TPA (tetradecanoyl phorbol acetate), NGF (nerve growth factor), and EGF (epidermal growth factor). The EGR1 gene expression is activated during this treatment. Thus, by stably transfecting PC12 cells with a construct containing an EGR promoter linked to SEAP reporter, activation of PC12 cells by polypeptide of the present invention can be assessed.

[1118] The EGRISEAP reporter construct can be assembled by the following protocol. The EGR-1 promoter sequence (−633 to +1)(Sakamoto K et al., Oncogene 6:867-871 (1991)) can be PCR amplified from human genomic DNA using the following primers:

[1119] 5′ GCGCTCGAGGGATGACAGCGATAGAACCCCGG -3′ (SEQ ID NO: 1552)

[1120] and

[1121] 5′ GCGAAGCTTCGCGACTCCCCGGATCCGCCTC-3′ (SEQ ID NO: 1553).

[1122] Using the GAS:SEAP/Neo vector produced in Example 31, EGR1 amplified product can then be inserted into this vector. Linearize the GAS:SEAP/Neo vector using restriction enzymes XhoI/HindIII, removing the GAS/SV40 stuffer. Restrict the EGR1 amplified product with these same enzymes. Ligate the vector and the EGR1 promoter.

[1123] To prepare 96 well-plates for cell culture, two mls of a coating solution (1:30 dilution of collagen type I (Upstate Biotech Inc. Cat#08-115) in 30% ethanol (filter sterilized)) is added per one 10 cm plate or 50 ml per well of the 96-well plate, and allowed to air dry for 2 hr.

[1124] PC12 cells are routinely grown in RPMI-1640 medium (Bio Whittaker) containing 10% horse serum (JRH BIOSCIENCES, Cat. # 12449-78P), 5% heat-inactivated fetal bovine serum (FBS) supplemented with 100 units/ml penicillin and 100 ug/ml streptomycin on a precoated 10 cm tissue culture dish. One to four split is done every three to four days. Cells are removed from the plates by scraping and resuspended with pipetting up and down for more than 15 times.

[1125] Transfect the EGR/SEAP/Neo construct into PC12 using the Lipofectamine protocol described in Example 31. EGR-SEAP/PC12 stable cells are obtained by growing the cells in 300 ug/ml G418. The G418-free medium is used for routine growth but every one to two months, the cells should be re-grown in 300 ug/ml G418 for couple of passages.

[1126] To assay for neuronal activity, a 10 cm plate with cells around 70 to 80% confluent is screened by removing the old medium. Wash the cells once with PBS (Phosphate buffered saline). Then starve the cells in low serum medium (RPMI-1640 containing 1% horse serum and 0.5% FBS with antibiotics) overnight.

[1127] The next morning, remove the medium and wash the cells with PBS. Scrape off the cells from the plate, suspend the cells well in 2 ml low serum medium. Count the cell number and add more low serum medium to reach final cell density as 5×10⁵ cells/ml.

[1128] Add 200 ul of the cell suspension to each well of 96-well plate (equivalent to 1×10⁵ cells/well). Add 50 ul supernatant produced by Example 31, 37 degree C. for 48 to 72 hr. As a positive control, a growth factor known to activate PC12 cells through EGR can be used, such as 50 ng/ul of Neuronal Growth Factor (NGF). Over fifty-fold induction of SEAP is typically seen in the positive control wells. SEAP assay the supernatant according to Example 37.

### Example 36

### High-Throughput Screening Assay for T-cell Activity

[1129] NF-KB (Nuclear Factor KB) is a transcription factor activated by a wide variety of agents including the inflammatory cytokines IL-1 and TNF, CD30 and CD40, lymphotoxin-alpha and lymphotoxin-beta, by exposure to LPS or thrombin, and by expression of certain viral gene products. As a transcription factor, NF-KB regulates the expression of genes involved in immune cell activation, control of apoptosis (NF- KB appears to shield cells from apoptosis), B and T-cell development, anti-viral and antimicrobial responses, and multiple stress responses.

[1130] In non-stimulated conditions, NF- KB is retained in the cytoplasm with I-KB (Inhibitor KB). However, upon stimulation, I- KB is phosphorylated and degraded, causing NF- KB to shuttle to the nucleus, thereby activating transcription of target genes. Target genes activated by NF- KB include IL-2, IL-6, GM-CSF, ICAM-1 and class 1 MHC.

[1131] Due to its central role and ability to respond to a range of stimuli, reporter constructs utilizing the NF-KB promoter element are used to screen the supernatants produced in Example 30. Activators or inhibitors of NF-KB would be useful in treating, preventing, and/or diagnosing diseases. For example, inhibitors of NF-KB could be used to treat those diseases related to the acute or chronic activation of NF-KB, such as rheumatoid arthritis.

[1132] To construct a vector containing the NF-KB promoter element, a PCR based strategy is employed. The upstream primer contains four tandem copies of the NF-KB binding site (GGGGACTTTCCC) (SEQ ID NO:1554), 18 bp of sequence complementary to the 5′ end of the SV40 early promoter sequence, and is flanked with an XhoI site:

[1133] 5′ :GCGGCCTCGAGGGGACTTTCCCGGGGACTTTCCGGGGACTTTCCGGGACTTT CCATCCTGCCATCTCAATTAG:3′ (SEQ ID NO:1555).

[1134] The downstream primer is complementary to the 3′ end of the SV40 promoter and is flanked with a Hind III site:

[1135] 5′:GCGGCAAGCTTTTTGCAAAGCCTAGGC: 3′ (SEQ ID NO: 1550).

[1136] PCR amplification is performed using the SV40 promoter template present in the pB-gal:promoter plasmid obtained from Clontech. The resulting PCR fragment is digested with XhoI and Hind III and subcloned into BLSK2-. (Stratagene) Sequencing with the T7 and T3 primers confirms the insert contains the following sequence:

[1137] 5′ :CTCGAGGGGACTTTCCCGGGGACTTTCCGGGGACTTTCCGGGACTTTCCATC TGCCATCTCAATTAGTCAGCAACCATAGTCCCGCCCCTAACTCCGCCCATCCC GCCCCTAACTCCGCCCAGTTCCGCCCATTCTCCGCCCCATGGCTGACTAATTTT TTTTATTTATGCAGAGGCCGAGGCCGCCTCGGCCTCTGAGCTATTCCAGAAGT AGTGAGGAGGCTTTTTTGGAGGCCTAGGCTTTGCAAAAAGCTT:3′ (SEQ ID NO: 1556).

[1138] Next, replace the SV40 minimal promoter element present in the pSEAP2-promoter plasmid (Clontech) with this NF-KB/SV40 fragment using XhoI and HindIII. However, this vector does not contain a neomycin resistance gene, and therefore, is not preferred for mammalian expression systems.

[1139] In order to generate stable mammalian cell lines, the NF-KB/SV40/SEAP cassette is removed from the above NF-KB/SEAP vector using restriction enzymes SalI and NotI, and inserted into a vector containing neomycin resistance. Particularly, the NF-KB/SV40/SEAP cassette was inserted into pGFP-1 (Clontech), replacing the GFP gene, after restricting pGFP-1 with SalI and NotI.

[1140] Once NF-KB/SV40/SEAP/Neo vector is created, stable Jurkat T-cells are created and maintained according to the protocol described in Example 32. Similarly, the method for assaying supernatants with these stable Jurkat T-cells is also described in Example 32. As a positive control, exogenous TNF alpha (0.1, 1, 10 ng) is added to wells H9, H10, and H11, with a 5-10 fold activation typically observed.

### Example 36

### Assay for SEAP Activity

[1141] As a reporter molecule for the assays described in Examples 32-35, SEAP activity is assayed using the Tropix Phospho-light Kit (Cat. BP-400) according to the following general procedure. The Tropix Phospho-light Kit supplies the Dilution, Assay, and Reaction Buffers used below.

[1142] Prime a dispenser with the 2.5× Dilution Buffer and dispense 15 ul of 2.5× dilution buffer into Optiplates containing 35 ul of a supernatant. Seal the plates with a plastic sealer and incubate at 65 degree C. for 30 min. Separate the Optiplates to avoid uneven heating.

[1143] Cool the samples to room temperature for 15 minutes. Empty the dispenser and prime with the Assay Buffer. Add 50 ml Assay Buffer and incubate at room temperature 5 min. Empty the dispenser and prime with the Reaction Buffer (see the table below). Add 50 ul Reaction Buffer and incubate at room temperature for 20 minutes. Since the intensity of the chemiluminescent signal is time dependent, and it takes about 10 minutes to read 5 plates on luminometer, one should treat 5 plates at each time and start the second set 10 minutes later.

[1144] Read the relative light unit in the luminometer. Set H12 as blank, and print the results. An increase in chemiluminescence indicates reporter activity.

[1145] Reaction Buffer Formulation:

| # of plates | Rxn buffer diluent (ml) | CSPD (ml) |
|---|---|---|
| 10 | 60 | 3 |
| 11 | 65 | 3.25 |
| 12 | 70 | 3.5 |
| 13 | 75 | 3.75 |
| 14 | 80 | 4 |
| 15 | 85 | 4.25 |
| 16 | 90 | 4.5 |
| 17 | 95 | 4.75 |
| 18 | 100 | 5 |
| 19 | 105 | 5.25 |
| 20 | 110 | 5.5 |
| 21 | 115 | 5.75 |
| 22 | 120 | 6 |
| 23 | 125 | 6.25 |
| 24 | 130 | 6.5 |
| 25 | 135 | 6.75 |
| 26 | 140 | 7 |
| 27 | 145 | 7.25 |
| 28 | 150 | 7.5 |
| 29 | 155 | 7.75 |
| 30 | 160 | 8 |
| 31 | 165 | 8.25 |
| 32 | 170 | 8.5 |
| 33 | 175 | 8.75 |
| 34 | 180 | 9 |
| 35 | 185 | 9.25 |
| 36 | 190 | 9.5 |
| 37 | 195 | 9.75 |
| 38 | 200 | 10 |
| 39 | 205 | 10.25 |
| 40 | 210 | 10.5 |
| 41 | 215 | 10.75 |
| 42 | 220 | 11 |
| 43 | 225 | 11.25 |
| 44 | 230 | 11.5 |
| 45 | 235 | 11.75 |
| 46 | 240 | 12 |
| 47 | 245 | 12.25 |
| 48 | 250 | 12.5 |
| 49 | 255 | 12.75 |
| 50 | 260 | 13 |

### Example 37

### High-Throughput Screening Assay Identifying Changes in Small Molecule Concentration and Membrane Permeability

[1146] Binding of a ligand to a receptor is known to alter intracellular levels of small molecules, such as calcium, potassium, sodium, and pH, as well as alter membrane potential. These alterations can be measured in an assay to identify supernatants which bind to receptors of a particular cell. Although the following protocol describes an assay for calcium, this protocol can easily be modified to detect changes in potassium, sodium, pH, membrane potential, or any other small molecule which is detectable by a fluorescent probe.

[1147] The following assay uses Fluorometric Imaging Plate Reader (“FLIPR”) to measure changes in fluorescent molecules (Molecular Probes) that bind small molecules. Clearly, any fluorescent molecule detecting a small molecule can be used instead of the calcium fluorescent molecule, fluo-4 (Molecular Probes, Inc.; catalog no. F-14202), used here.

[1148] For adherent cells, seed the cells at 10,000 -20,000 cells/well in a Co-star black 96-well plate with clear bottom. The plate is incubated in a C0₂ incubator for 20 hours. The adherent cells are washed two times in Biotek washer with 200 ul of HBSS (Hank's Balanced Salt Solution) leaving 100 ul of buffer after the final wash.

[1149] A stock solution of 1 mg/ml fluo-4 is made in 10% pluronic acid DMSO. To load the cells with fluo-4, 50 ul of 12 ug/ml fluo-4 is added to each well. The plate is incubated at 37 degrees C. in a CO₂ incubator for 60 min. The plate is washed four times in the Biotek washer with HBSS leaving 100 ul of buffer.

[1150] For non-adherent cells, the cells are spun down from culture media. Cells are re-suspended to 2-5×10⁶ cells/ml with HBSS in a 50-ml conical tube. 4 ul of 1 mg/ml fluo-4 solution in 10% pluronic acid DMSO is added to each ml of cell suspension. The tube is then placed in a 37 degrees C. water bath for 30-60 min. The cells are washed twice with HBSS, resuspended to 1×10⁶ cells/ml, and dispensed into a microplate, 100 ul/well. The plate is centrifuged at 1000 rpm for 5 min. The plate is then washed once in Denley Cell Wash with 200 ul, followed by an aspiration step to 100 ul final volume.

[1151] For a non-cell based assay, each well contains a fluorescent molecule, such as fluo-4. The supernatant is added to the well, and a change in fluorescence is detected.

[1152] To measure the fluorescence of intracellular calcium, the FLIPR is set for the following parameters: (1) System gain is 300-800 mW; (2) Exposure time is 0.4 second; (3) Camera F/stop is F/2; (4) Excitation is 488 nm; (5) Emission is 530 nm; and (6) Sample addition is 50 ul. Increased emission at 530 nm indicates an extracellular signaling event caused by the a molecule, either polypeptide of the present invention or a molecule induced by polypeptide of the present invention, which has resulted in an increase in the intracellular Ca++ concentration.

### Example 38

### High-Throughput Screening Assay Identifying Tyrosine Kinase Activity

[1153] The Protein Tyrosine Kinases (PTK) represent a diverse group of transmembrane and cytoplasmic kinases. Within the Receptor Protein Tyrosine Kinase RPTK) group are receptors for a range of mitogenic and metabolic growth factors including the PDGF, FGF, EGF, NGF, HGF and Insulin receptor subfamilies. In addition there are a large family of RPTKs for which the corresponding ligand is unknown. Ligands for RPTKs include mainly secreted small proteins, but also membrane-bound and extracellular matrix proteins.

[1154] Activation of RPTK by ligands involves ligand-mediated receptor dimerization, resulting in transphosphorylation of the receptor subunits and activation of the cytoplasmic tyrosine kinases. The cytoplasmic tyrosine kinases include receptor associated tyrosine kinases of the src-family (e.g., src, yes, lck, lyn, fyn) and non-receptor linked and cytosolic protein tyrosine kinases, such as the Jak family, members of which mediate signal transduction triggered by the cytokine superfamily of receptors (e.g., the Interleukins, Interferons, GM-CSF, and Leptin).

[1155] Because of the wide range of known factors capable of stimulating tyrosine kinase activity, identifying whether polypeptide of the present invention or a molecule induced by polypeptide of the present invention is capable of activating tyrosine kinase signal transduction pathways is of interest. Therefore, the following protocol is designed to identify such molecules capable of activating the tyrosine kinase signal transduction pathways.

[1156] Seed target cells (e.g., primary keratinocytes) at a density of approximately 25,000 cells per well in a 96 well Loprodyne Silent Screen Plates purchased from Nalge Nunc (Naperville, Ill.). The plates are sterilized with two 30 minute rinses with 100% ethanol, rinsed with water and dried overnight. Some plates are coated for 2 hr with 100 ml of cell culture grade type I collagen (50 mg/ml), gelatin (2%) or polylysine (50 mg/ml), all of which can be purchased from Sigma Chemicals (St. Louis, Mo.) or 10% Matrigel purchased from Becton Dickinson (Bedford, Mass.), or calf serum, rinsed with PBS and stored at 4 degree C. Cell growth on these plates is assayed by seeding 5,000 cells/well in growth medium and indirect quantitation of cell number through use of alamarBlue as described by the manufacturer Alamar Biosciences, Inc. (Sacramento, Calif.) after 48 hr. Falcon plate covers #3071 from Becton Dickinson (Bedford,MA) are used to cover the Loprodyne Silent Screen Plates. Falcon Microtest III cell culture plates can also be used in some proliferation experiments.

[1157] To prepare extracts, A431 cells are seeded onto the nylon membranes of Loprodyne plates (20,000/200 ml/well) and cultured overnight in complete medium. Cells are quiesced by incubation in serum-free basal medium for 24 hr. After 5-20 minutes treatment with EGF (60 ng/ml) or 50 ul of the supernatant produced in Example 30, the medium was removed and 100 ml of extraction buffer ((20 mM HEPES pH 7.5, 0.15 M NaCl, 1% Triton X-100, 0.1% SDS, 2 mM Na3VO4, 2 mM Na4P2O7 and a cocktail of protease inhibitors (# 1836170) obtained from Boeheringer Mannheim (Indianapolis, Ind.) is added to each well and the plate is shaken on a rotating shaker for 5 minutes at 4° C. The plate is then placed in a vacuum transfer manifold and the extract filtered through the 0.45 mm membrane bottoms of each well using house vacuum. Extracts are collected in a 96-well catch/assay plate in the bottom of the vacuum manifold and immediately placed on ice. To obtain extracts clarified by centrifugation, the content of each well, after detergent solubilization for 5 minutes, is removed and centrifuged for 15 minutes at 4 degree C. at 16,000× g.

[1158] Test the filtered extracts for levels of tyrosine kinase activity. Although many methods of detecting tyrosine kinase activity are known, one method is described here.

[1159] Generally, the tyrosine kinase activity of a supernatant is evaluated by determining its ability to phosphorylate a tyrosine residue on a specific substrate (a biotinylated peptide). Biotinylated peptides that can be used for this purpose include PSK1 (corresponding to amino acids 6-20 of the cell division kinase cdc2-p34) and PSK2 (corresponding to amino acids 1-17 of gastrin). Both peptides are substrates for a range of tyrosine kinases and are available from Boehringer Mannheim.

[1160] The tyrosine kinase reaction is set up by adding the following components in order. First, add 10 ul of 5 uM Biotinylated Peptide, then lOul ATP/Mg₂₊ (5 mM ATP/50 mM MgCl₂), then 10 ul of 5× Assay Buffer (40 mM imidazole hydrochloride, pH7.3, 40 mM beta-glycerophosphate, 1 mM EGTA, 100 mM MgCl₂, 5 mM MnCl₂, 0.5 mg/ml BSA), then 5 ul of Sodium Vanadate (1 mM), and then 5 ul of water. Mix the components gently and preincubate the reaction mix at 30 degree C. for 2 min. Initial the reaction by adding 10 ul of the control enzyme or the filtered supernatant.

[1161] The tyrosine kinase assay reaction is then terminated by adding 10 ul of 120 mm EDTA and place the reactions on ice.

[1162] Tyrosine kinase activity is determined by transferring 50 ul aliquot of reaction mixture to a microtiter plate (MTP) module and incubating at 37 degree C. for 20 min. This allows the streptavadin coated 96 well plate to associate with the biotinylated peptide. Wash the MTP module with 300ul/well of PBS four times. Next add 75 ul of anti-phospotyrosine antibody conjugated to horse radish peroxidase(anti-P-Tyr-POD(0.5 u/ml)) to each well and incubate at 37 degree C for one hour. Wash the well as above.

[1163] Next add 100 ul of peroxidase substrate solution (Boehringer Mannheim) and incubate at room temperature for at least 5 mins (up to 30 min). Measure the absorbance of the sample at 405 nm by using ELISA reader. The level of bound peroxidase activity is quantitated using an ELISA reader and reflects the level of tyrosine kinase activity.

### Example 39

### High-Throughput Screening Assay Identifying Phosphorylation Activity

[1164] As a potential alternative and/or compliment to the assay of protein tyrosine kinase activity described in Example 38, an assay which detects activation (phosphorylation) of major intracellular signal transduction intermediates can also be used. For example, as described below one particular assay can detect tyrosine phosphorylation of the Erk-1 and Erk-2 kinases. However, phosphorylation of other molecules, such as Raf, JNK, p38 MAP, Map kinase kinase (MEK), MEK kinase, Src, Muscle specific kinase (MuSK), IRAK, Tec, and Janus, as well as any other phosphoserine, phosphotyrosine, or phosphothreonine molecule, can be detected by substituting these molecules for Erk-1 or Erk-2 in the following assay.

[1165] Specifically, assay plates are made by coating the wells of a 96-well ELISA plate with O.lml of protein G (1 ug/ml) for 2 hr at room temp, (RT). The plates are then rinsed with PBS and blocked with 3% BSA/PBS for 1 hr at RT. The protein G plates are then treated with 2 commercial monoclonal antibodies (10 ng/well) against Erk-1 and Erk-2 (1 hr at RT) (Santa Cruz Biotechnology). (To detect other molecules, this step can easily be modified by substituting a monoclonal antibody detecting any of the above described molecules.) After 3-5 rinses with PBS, the plates are stored at 4 degree C. until use.

[1166] A431 cells are seeded at 20,000/well in a 96-well Loprodyne filterplate and cultured overnight in growth medium. The cells are then starved for 48 hr in basal medium (DMEM) and then treated with EGF (6 ng/well) or 50 ul of the supernatants obtained in Example 30 for 5-20 minutes. The cells are then solubilized and extracts filtered directly into the assay plate.

[1167] After incubation with the extract for 1 hr at RT, the wells are again rinsed. As a positive control, a commercial preparation of MAP kinase (10 ng/well) is used in place of A431 extract. Plates are then treated with a commercial polyclonal (rabbit) antibody (1 ug/ml) which specifically recognizes the phosphorylated epitope of the Erk-1 and Erk-2 kinases (1 hr at RT). This antibody is biotinylated by standard procedures. The bound polyclonal antibody is then quantitated by successive incubations with Europium-streptavidin and Europium fluorescence enhancing reagent in the Wallac DELFIA instrument (time-resolved fluorescence). An increased fluorescent signal over background indicates a phosphorylation by polypeptide of the present invention or a molecule induced by polypeptide of the present invention.

### Example 40

### Assay for the Stimulation of Bone Marrow CD34++Cell Proliferation

[1168] This assay is based on the ability of human CD34+ to proliferate in the presence of hematopoietic growth factors and evaluates the ability of isolated polypeptides expressed in mammalian cells to stimulate proliferation of CD34+ cells.

[1169] It has been previously shown that most mature precursors will respond to only a single signal. More immature precursors require at least two signals to respond. Therefore, to test the effect of polypeptides on hematopoietic activity of a wide range of progenitor cells, the assay contains a given polypeptide in the presence or absence of other hematopoietic growth factors. Isolated cells are cultured for 5 days in the presence of Stem Cell Factor (SCF) in combination with tested sample. SCF alone has a very limited effect on the proliferation of bone marrow (BM) cells, acting in such conditions only as a “survival” factor. However, combined with any factor exhibiting stimulatory effect on these cells (e.g., IL-3), SCF will cause a synergistic effect. Therefore, if the tested polypeptide has a stimulatory effect on a hematopoietic progenitors, such activity can be easily detected. Since normal BM cells have a low level of cycling cells, it is likely that any inhibitory effect of a given polypeptide, or agonists or antagonists thereof, might not be detected. Accordingly, assays for an inhibitory effect on progenitors is preferably tested in cells that are first subjected to in vitro stimulation with SCF+IL+3, and then contacted with the compound that is being evaluated for inhibition of such induced proliferation.

[1170] Briefly, CD34+ cells are isolated using methods known in the art. The cells are thawed and resuspended in medium (QBSF 60 serum-free medium with 1% L-glutamine (500ml) Quality Biological, Inc., Gaithersburg, MD Cat# 160-204-101). After several gentle centrifugation steps at 200× g, cells are allowed to rest for one hour. The cell count is adjusted to 2.5×10⁵ cells/ml. During this time, 100 μl of sterile water is added to the peripheral wells of a 96-well plate. The cytokines that can be tested with a given polypeptide in this assay is rhSCF (R&D Systems, Minneapolis, MN, Cat# 255-SC) at 50 ng/ml alone and in combination with rhSCF and rhIL-3 (R&D Systems, Minneapolis, Minn., Cat# 203-ML) at 30 ng/ml. After one hour, 10 μl of prepared cytokines, 50 μl of the supernatants prepared in Example 30 (supernatants at 1:2 dilution=50 μl) and 20 μl of diluted cells are added to the media which is already present in the wells to allow for a final total volume of 100 μl. The plates are then placed in a 37° C./5% CO₂ incubator for five days.

[1171] Eighteen hours before the assay is harvested, 0.5 μCi/well of [3H] Thymidine is added in a 10 μl volume to each well to determine the proliferation rate. The experiment is terminated by harvesting the cells from each 96-well plate to a filtermat using the Tomtec Harvester 96. After harvesting, the filtermats are dried, trimmed and placed into OmniFilter assemblies consisting of one OmniFilter plate and one OmniFilter Tray. 60 μl Microscint is added to each well and the plate sealed with TopSeal-A press-on sealing film A bar code 15 sticker is affixed to the first plate for counting. The sealed plates is then loaded and the level of radioactivity determined via the Packard Top Count and the printed data collected for analysis. The level of radioactivity reflects the amount of cell proliferation.

[1172] The studies described in this example test the activity of a given polypeptide to stimulate bone marrow CD34+ cell proliferation. One skilled in the art could easily modify the exemplified studies to test the activity of polynucleotides (e.g., gene therapy), antibodies, agonists, and/or antagonists and fragments and variants thereof. As a nonlimiting example, potential antagonists tested in this assay would be expected to inhibit cell proliferation in the presence of cytokines and/or to increase the inhibition of cell proliferation in the presence of cytokines and a given polypeptide. In contrast, potential agonists tested in this assay would be expected to enhance cell proliferation and/or to decrease the inhibition of cell proliferation in the presence of cytokines and a given polypeptide.

[1173] The ability of a gene to stimulate the proliferation of bone marrow CD34+ cells indicates that polynucleotides and polypeptides corresponding to the gene are useful for the diagnosis and treatment of disorders affecting the immune system and hematopoiesis. Representative uses are described in the “Immune Activity” and “Infectious Disease” sections above, and elsewhere herein.

### Example 41

### Assay for Extracellular Matrix Enhanced Cell Response (EMECR)

[1174] The objective of the Extracellular Matrix Enhanced Cell Response (EMECR) assay is to identify gene products (e.g., isolated polypeptides) that act on the hematopoietic stem cells in the context of the extracellular matrix (ECM) induced signal.

[1175] Cells respond to the regulatory factors in the context of signal(s) received from the surrounding microenvironment. For example, fibroblasts, and endothelial and epithelial stem cells fail to replicate in the absence of signals from the ECM. Hematopoietic stem cells can undergo self-renewal in the bone marrow, but not in in vitro suspension culture. The ability of stem cells to undergo self-renewal in vitro is dependent upon their interaction with the stromal cells and the ECM protein fibronectin (fn). Adhesion of cells to fn is mediated by the α₅.β₁ and α₄.β₁ integrin receptors, which are expressed by human and mouse hematopoietic stem cells. The factor(s) which integrate with the ECM environment and responsible for stimulating stem cell self-renewal has not yet been identified. Discovery of such factors should be of great interest in gene therapy and bone marrow transplant applications

[1176] Briefly, polystyrene, non tissue culture treated, 96-well plates are coated with fn fragment at a coating concentration of 0.2 μg/cm². Mouse bone marrow cells are plated (1,000 cells/well) in 0.2 ml of serum-free medium. Cells cultured in the presence of IL-3 (5 ng/ml)+SCF (50 ng/ml) would serve as the positive control, conditions under which little self-renewal but pronounced differentiation of the stem cells is to be expected. Gene products of the invention (e.g., including, but not limited to, polynucleotides and polypeptides of the present invention, and supernatants produced in Example 30), are tested with appropriate negative controls in the presence and absence of SCF(5.0 ng/ml), where test factor supemates represent 10% of the total assay volume. The plated cells are then allowed to grow by incubating in a low oxygen environment ( 5% CO₂, 7% O₂, and 88% N₂ ) tissue culture incubator for 7 days. The number of proliferating cells within the wells is then quantitated by measuring thymidine incorporation into cellular DNA. Verification of the positive hits in the assay will require phenotypic characterization of the cells, which can be accomplished by scaling up of the culture system and using appropriate antibody reagents against cell surface antigens and FACScan.

[1177] One skilled in the art could easily modify the exemplified studies to test the activity of polynucleotides (e.g., gene therapy), antibodies, agonists, and/or antagonists and fragments and variants thereof.

[1178] If a particular polypeptide of the present invention is found to be a stimulator of hematopoietic progenitors, polynucleotides and polypeptides corresponding to the gene encoding said polypeptide may be useful for the diagnosis and treatment of disorders affecting the immune system and hematopoiesis. Representative uses are described in the “Immune Activity” and “Infectious Disease” sections above, and elsewhere herein. The gene product may also be useful in the expansion of stem cells and committed progenitors of various blood lineages, and in the differentiation and/or proliferation of various cell types.

[1179] Additionally, the polynucleotides and/or polypeptides of the gene of interest and/or agonists and/or antagonists thereof, may also be employed to inhibit the proliferation and differentiation of hematopoietic cells and therefore may be employed to protect bone marrow stem cells from chemotherapeutic agents during chemotherapy. This antiproliferative effect may allow administration of higher doses of chemotherapeutic agents and, therefore, more effective chemotherapeutic treatment.

[1180] Moreover, polynucleotides and polypeptides corresponding to the gene of interest may also be useful for the treatment and diagnosis of hematopoietic related disorders such as, for example, anemia, pancytopenia, leukopenia, thrombocytopenia or leukemia since stromal cells are important in the production of cells of hematopoietic lineages. The uses include bone marrow cell ex-vivo culture, bone marrow transplantation, bone marrow reconstitution, radiotherapy or chemotherapy of neoplasia.

### Example 42

### Human Dermal Fibroblast and Aortic Smooth Muscle Cell Proliferation

[1181] The polypeptide of interest is added to cultures of normal human dermal fibroblasts (NHDF) and human aortic smooth muscle cells (AoSMC) and two co-assays are performed with each sample. The first assay examines the effect of the polypeptide of interest on the proliferation of normal human dermal fibroblasts (NHDF) or aortic smooth muscle cells (AoSMC). Aberrant growth of fibroblasts or smooth muscle cells is a part of several pathological processes, including fibrosis, and restenosis. The second assay examines IL6 production by both NHDF and SMC. IL6 production is an indication of functional activation. Activated cells will have increased production of a number of cytokines and other factors, which can result in a proinflammatory or immunomodulatory outcome. Assays are run with and without co-TNFa stimulation, in order to check for costimulatory or inhibitory activity.

[1182] Briefly, on day 1, 96-well black plates are set up with 1000 cells/well (NHDF) or 2000 cells/well (AoSMC) in 100 μl culture media. NHDF culture media contains: Clonetics FB basal media, 1 mg/ml hFGF, 5mg/ml insulin, 50 mg/ml gentamycin, 2%FBS, while AoSMC culture media contains Clonetics SM basal media, 0.5 μg/ml hEGF, 5mg/ml insulin, 1 ug/ml hFGF, 50mg/ml gentamycin, 50 μg/ml Amphotericin B, 5%FBS. After incubation at 37° C. for at least 4-5 hours, culture media is aspirated and replaced with growth arrest media. Growth arrest media for NHDF contains fibroblast basal media, 50 mg/ml gentamycin, 2% FBS, while growth arrest media for AoSMC contains SM basal media, 50 mg/ml gentamycin, 50 μg/ml Amphotericin B, 0.4% FBS. Incubate at 37° C. until day 2.

[1183] On day 2, serial dilutions and templates of the polypeptide of interest are designed such that they always include media controls and known-protein controls. For both stimulation and inhibition experiments, proteins are diluted in growth arrest media. For inhibition experiments, TNFa is added to a final concentration of 2 ng/ml (NHDF) or 5 ng/ml (AoSMC). Add ⅓ vol media containing controls or polypeptides of the present invention and incubate at 37° C./5% CO₂ until day 5.

[1184] Transfer 60 μl from each well to another labeled 96-well plate, cover with a plate-sealer, and store at 4° C. until Day 6 (for IL6 ELISA). To the remaining 100 μl in the cell culture plate, aseptically add Alamar Blue in an amount equal to 10% of the culture volume (10 μl). Return plates to incubator for 3 to 4 hours. Then measure fluorescence with excitation at 530 nm and emission at 590 nm using the CytoFluor. This yields the growth stimulation/inhibition data.

[1185] On day 5, the IL6 ELISA is performed by coating a 96 well plate with 50-100 ul/well of Anti-Human IL6 Monoclonal antibody diluted in PBS, pH 7.4, incubate ON at room temperature.

[1186] On day 6, empty the plates into the sink and blot on paper towels. Prepare Assay Buffer containing PBS with 4% BSA. Block the plates with 200 μl/well of Pierce Super Block blocking buffer in PBS for 1-2 hr and then wash plates with wash buffer (PBS, 0.05% Tween-20). Blot plates on paper towels. Then add 50 μl/well of diluted Anti-Human IL-6 Monoclonal, Biotin-labeled antibody at 0.50 mg/ml. Make dilutions of IL-6 stock in media (30, 10, 3, 1, 0.3, 0 ng/ml). Add duplicate samples to top row of plate. Cover the plates and incubate for 2 hours at RT on shaker. Plates are washed with wash buffer and blotted on paper towels. Dilute EU-labeled Streptavidin 1:1000 in Assay buffer, and add 100 μl/well. Cover the plate and incubate 1 h at RT. Plates are again washed with wash buffer and blotted on paper towels. Add 100 μl/well of Enhancement Solution and shake for 5 minutes. Read the plate on the Wallac DELFIA Fluorometer. Readings from triplicate samples in each assay are tabulated and averaged.

[1187] A positive result in this assay suggests AoSMC cell proliferation and that the polypeptide of the present invention may be involved in dermal fibroblast proliferation and/or smooth muscle cell proliferation. A positive result also suggests many potential uses of polypeptides, polynucleotides, agonists and/or antagonists of the polynucleotide/polypeptide of the present invention which gives a positive result. For example, inflammation and immune responses, wound healing, and angiogenesis, as detailed throughout this specification. Particularly, polypeptides of the present invention and polynucleotides of the present invention may be used in wound healing and dermal regeneration, as well as the promotion of vasculargenesis, both of the blood vessels and lymphatics. The growth of vessels can be used in the treatment of, for example, cardiovascular diseases. Additionally, antagonists of polypeptides and polynucleotides of the invention may be useful in treating diseases, disorders, and/or conditions which involve angiogenesis by acting as an anti-vascular (e.g., anti-angiogenesis). These diseases, disorders, and/or conditions are known in the art and/or are described herein, such as, for example, malignancies, solid tumors, benign tumors, for example hemangiomas, acoustic neuromas, neurofibromas, trachomas, and pyogenic granulomas; artheroscleric plaques; ocular angiogenic diseases, for example, diabetic retinopathy, retinopathy of prematurity, macular degeneration, corneal graft rejection, neovascular glaucoma, retrolental fibroplasia, rubeosis, retinoblastoma, uvietis and Pterygia (abnormal blood vessel growth) of the eye; rheumatoid arthritis; psoriasis; delayed wound healing; endometriosis; vasculogenesis; granulations; hypertrophic scars (keloids); nonunion fractures; scleroderma; trachoma; vascular adhesions; myocardial angiogenesis; coronary collaterals; cerebral collaterals; arteriovenous malformations; ischemic limb angiogenesis; Osler-Webber Syndrome; plaque neovascularization; telangiectasia; hemophiliac joints; angiofibroma; fibromuscular dysplasia; wound granulation; Crohn's disease; and atherosclerosis. Moreover, antagonists of polypeptides and polynucleotides of the invention may be useful in treating anti-hyperproliferative diseases and/or anti-inflammatory known in the art and/or described herein.

[1188] One skilled in the art could easily modify the exemplified studies to test the activity of polynucleotides (e.g., gene therapy), antibodies, agonists, and/or antagonists and fragments and variants thereof.

### Example 43

### Cellular Adhesion Molecule (CAM) Expression on Endothelial Cells

[1189] The recruitment of lymphocytes to areas of inflammation and angiogenesis involves specific receptor-ligand interactions between cell surface adhesion molecules (CAMs) on lymphocytes and the vascular endothelium. The adhesion process, in both normal and pathological settings, follows a multi-step cascade that involves intercellular adhesion molecule-1 (ICAM-1), vascular cell adhesion molecule-1 (VCAM-1), and endothelial leukocyte adhesion molecule-1 (E-selectin) expression on endothelial cells (EC). The expression of these molecules and others on the vascular endothelium determines the efficiency with which leukocytes may adhere to the local vasculature and extravasate into the local tissue during the development of an inflammatory response. The local concentration of cytokines and growth factor participate in the modulation of the expression of these CAMs.

[1190] Briefly, endothelial cells (e.g., Human Umbilical Vein Endothelial cells (HUVECs)) are grown in a standard 96 well plate to confluence, growth medium is removed from the cells and replaced with 100 μl of 199 Medium (10% fetal bovine serum (FBS)). Samples for testing and positive or negative controls are added to the plate in triplicate (in 10 μl volumes). Plates are then incubated at 37° C. for either 5 h (selectin and integrin expression) or 24 h (integrin expression only). Plates are aspirated to remove medium and 100 μl of 0.1% paraformaldehyde-PBS(with Ca++ and Mg++) is added to each well. Plates are held at 4° C. for 30 min. Fixative is removed from the wells and wells are washed 1× with PBS(+Ca,Mg)+0.5% BSA and drained. 10 μl of diluted primary antibody is added to the test and control wells. Anti-ICAM-1-Biotin, Anti-VCAM-1-Biotin and Anti-E-selectin-Biotin are used at a concentration of 10 μg/ml (1:10 dilution of 0.1 mg/ml stock antibody). Cells are incubated at 37° C. for 30 min. in a humidified environment. Wells are washed three times with PBS(+Ca,Mg)+0.5% BSA. 20 μl of diluted ExtrAvidin-Alkaline Phosphotase (1:5,000 dilution, refered to herein as the working dilution) are added to each well and incubated at 37° C. for 30 min. Wells are washed three times with PBS(+Ca,Mg)+0.5% BSA. Dissolve 1 tablet of p-Nitrophenol Phosphate pNPP per 5 ml of glycine buffer (pH 10.4). 100 μl of pNPP substrate in glycine buffer is added to each test well. Standard wells in triplicate are prepared from the working dilution of the ExtrAvidin-Alkaline Phosphotase in glycine buffer: 1:5,000 (10⁰) >10^{-0.5}>10⁻¹>10^{-1.5} 0.5 μl of each dilution is added to triplicate wells and the resulting AP content in each well is 5.50 ng, 1.74 ng, 0.55 ng, 0.18 ng. 100 μl of pNNP reagent is then added to each of the standard wells. The plate is incubated at 37° C. for 4 h. A volume of 50 μl of 3M NaOH is added to all wells. The plate is read on a plate reader at 405 nm using the background subtraction option on blank wells filled with glycine buffer only. Additionally, the template is set up to indicate the concentration of AP-conjugate in each standard well [5.50 ng; 1.74 ng; 0.55 ng; 0.18 ng]. Results are indicated as amount of bound AP-conjugate in each sample.

### Example 44

### Alamar Blue Endothelial Cells Proliferation Assay

[1191] This assay may be used to quantitatively determine protein mediated inhibition of bFGF-induced proliferation of Bovine Lymphatic Endothelial Cells (LECs), Bovine Aortic Endothelial Cells (BAECs) or Human Microvascular Uterine Myometrial Cells (UTMECs). This assay incorporates a fluorometric growth indicator based on detection of metabolic activity. A standard Alamar Blue Proliferation Assay is prepared in EGM-2MV with 10 ng /ml of bFGF added as a source of endothelial cell stimulation. This assay may be used with a variety of endothelial cells with slight changes in growth medium and cell concentration. Dilutions of the protein batches to be tested are diluted as appropriate. Serum-free medium (GIBCO SFM) without bFGF is used as a non-stimulated control and Angiostatin or TSP-1 are included as a known inhibitory controls.

[1192] Briefly, LEC, BAECs or UTMECs are seeded in growth media at a density of 5000 to 2000 cells/well in a 96 well plate and placed at 37-C overnight. After the overnight incubation of the cells, the growth media is removed and replaced with GIBCO EC-SFM. The cells are treated with the appropriate dilutions of the protein of interest or control protein sample(s) (prepared in SFM ) in triplicate wells with additional bFGF to a concentration of 10 ng/ ml. Once the cells have been treated with the samples, the plate(s) is/are placed back in the 37° C. incubator for three days. After three days 10 ml of stock alamar blue (Biosource Cat# DALI 100) is added to each well and the plate(s) is/are placed back in the 37° C. incubator for four hours. The plate(s) are then read at 530 nm excitation and 590 nm emission using the CytoFluor fluorescence reader. Direct output is recorded in relative fluorescence units.

[1193] Alamar blue is an oxidation-reduction indicator that both fluoresces and changes color in response to chemical reduction of growth medium resulting from cell growth. As cells grow in culture, innate metabolic activity results in a chemical reduction of the immediate surrounding environment. Reduction related to growth causes the indicator to change from oxidized (non-fluorescent blue) form to reduced (fluorescent red) form. i.e. stimulated proliferation will produce a stronger signal and inhibited proliferation will produce a weaker signal and the total signal is proportional to the total number of cells as well as their metabolic activity. The background level of activity is observed with the starvation medium alone. This is compared to the output observed from the positive control samples (bFGF in growth medium) and protein dilutions.

### Example 45

### Detection of Inhibition of a Mixed Lymphocyte Reaction

[1194] This assay can be used to detect and evaluate inhibition of a Mixed Lymphocyte Reaction (MLR) by gene products (e.g., isolated polypeptides). Inhibition of a MLR may be due to a direct effect on cell proliferation and viability, modulation of costimulatory molecules on interacting cells, modulation of adhesiveness between lymphocytes and accessory cells, or modulation of cytokine production by accessory cells. Multiple cells may be targeted by these polypeptides since the peripheral blood mononuclear fraction used in this assay includes T, B and natural killer lymphocytes, as well as monocytes and dendritic cells.

[1195] Polypeptides of interest found to inhibit the MLR may find application in diseases associated with lymphocyte and monocyte activation or proliferation. These include, but are not limited to, diseases such as asthma, arthritis, diabetes, inflammatory skin conditions, psoriasis, eczema, systemic lupus erythematosus, multiple sclerosis, glomerulonephritis, inflammatory bowel disease, crohn's disease, ulcerative colitis, arteriosclerosis, cirrhosis, graft vs. host disease, host vs. graft disease, hepatitis, leukemia and lymphoma.

[1196] Briefly, PBMCs from human donors are purified by density gradient centrifugation using Lymphocyte Separation Medium (LSM®, density 1.0770 g/ml, Organon Teknika Corporation, West Chester, Pa.). PBMCs from two donors are adjusted to 2×10⁶ cells/ml in RPMI-1640 (Life Technologies, Grand Island, N.Y.) supplemented with 10% FCS and 2 mM glutamine. PBMCs from a third donor is adjusted to 2×10⁵ cells/ml. Fifty microliters of PBMCs from each donor is added to wells of a 96-well round bottom microtiter plate. Dilutions of test materials (50 μl) is added in triplicate to microtiter wells. Test samples (of the protein of interest) are added for final dilution of 1:4; rhuIL-2 (R&D Systems, Minneapolis, Minn., catalog number 202-IL) is added to a final concentration of 1 μg/ml; anti-CD4 mAb (R&D Systems, clone 34930.11, catalog number MAB379) is added to a final concentration of 10 μg/ml. Cells are cultured for 7-8 days at 37° C. in 5% CO₂, and 1 μC of [³H] thymidine is added to wells for the last 16 hrs of culture. Cells are harvested and thymidine incorporation determined using a Packard TopCount. Data is expressed as the mean and standard deviation of triplicate determinations.

[1197] Samples of the protein of interest are screened in separate experiments and compared to the negative control treatment, anti-CD4 mAb, which inhibits proliferation of lymphocytes and the positive control treatment, IL-2 (either as recombinant material or supernatant), which enhances proliferation of lymphocytes.

[1198] One skilled in the art could easily modify the exemplified studies to test the activity of polynucleotides (e.g., gene therapy), antibodies, agonists, and/or antagonists and fragments and variants thereof.

[1199] It will be clear that the invention may be practiced otherwise than as particularly described in the foregoing description and examples. Numerous modifications and variations of the present invention are possible in light of the above teachings and, therefore, are within the scope of the appended claims.

[1200] The entire disclosure of each document cited (including patents, patent applications, journal articles, abstracts, laboratory manuals, books, or other disclosures) in the Background of the Invention, Detailed Description, and Examples is hereby incorporated herein by reference. Further, the paper copy on CD-ROM of the sequence listing submitted herewith and the corresponding computer readable form on CD-ROM are both incorporated herein by reference in their entireties. Moreover, the hard copy of and the corresponding computer readable form of the Sequence Listing of Ser. No. 60/124,270 and International Application No. PCT/US00/05883 are also incorporated herein by reference in their entireties.

The application's sequence listing, which the Patent Office published only in electronic form, follows.

SEQUENCE LISTING (1556 sequences)

SEQ ID NO: 1 - DNA, 633 bp, Homo sapiens
  misc_feature (206): n equals a,t,g, or c
  misc_feature (606): n equals a,t,g, or c
  misc_feature (616): n equals a,t,g, or c
gcaggatgagctacaggaagaatcagaaatgtcagaaaaaaagtcatgctcctcttctcccacccaaagtgagatatccacatcgctgcctccagatagacaaaggagaaaaagggagcttcgcaccttttcattttctgacgatgaaaataaacctccttcaccaaaggaaataaggatcgaagttgctgaaggcttcacctggnacagtaaccccttgaagtggagtgtggcagacgttgtgcggttcatcagatccactgactgtgcctccattagcaagaatattcctwgaccaggaaattgatgggcaggccctgttgctccttacccttcccactgttcaagaatgcatggacttaaaattgggccctgcatcaaactttgccatcacatagagaggrtcaagtttgctttttatgagcagtttgccaactgagaaggacaaccaaagtgagctgggatctttgaaggcacaaatgcaggcaaatccttcaccctgctttattaagtgggagctgggaatagtcctggggggcttctgggggccttgcagggtattcagctttgctctcttttggcacttttcggggggaagggaggganttcacagttnaggggaaggccaaaaac

SEQ ID NO: 2 - DNA, 295 bp, Homo sapiens
  misc_feature (147): n equals a,t,g, or c
agcggcacgagcggcacgagaagccctactcggatggggcacggactgtccaccttttctaatgtgtgttgtcagcctgtgctgtggcatagacatggatgcaaggaccactttggagactggggtggcctcaagagcacacagagnaagggaagaaggggccatcacaggatgccagcccctgcctgggttgggggcactcagccacggaccagccccttcctgggtatttattctctatttattgggggataggagaagaggcattctrcctgggtgggacaaacccctttaa

SEQ ID NO: 3 - DNA, 442 bp, Homo sapiens
  misc_feature (378): n equals a,t,g, or c
  misc_feature (422): n equals a,t,g, or c
aattcggcagagagagctgctcagttaggacccagagggaaccatggaaaccccagcgcattkctyttcctcctgctactctggctcccagatattaccgcagaaattgtgttgacgcatttccagacaccctgtctttgtctcctggggaaagagccaccctctcctgcaggaccagtcagagtgttggcagcaacttcttaacctggtatgaacaaaaatctggccagtytcccaggctcctcatgtttggtaactcccgcagsccactggcatcccagacagggtcagtggcagtgggtctgggacagayttcactytcaccatcagcagactggaggytgaagattttgcagtgtattwctgttcaacaatwtnggtttcgttcaacaatgtttcaattttgggccagggggccmagnttggaatyaaaggactgtgg

SEQ ID NO: 4 - DNA, 754 bp, Homo sapiens
  misc_feature (446): n equals a,t,g, or c
  misc_feature (662): n equals a,t,g, or c
  misc_feature (700): n equals a,t,g, or c
tccgaagtcggggaccctcctaccacctgtagagaagcgggagtggatctaaaataaaatccaggawtctgggggttcctagacggagccagayttcggaagggtgtcctgctactcctgctggggctcctccaggacaagggcacacaactggttccgttaagcccctctytcgctcagacgccatggagctggatctgtctccacctcatcttagcagctctccggaagacctttgcccagcccctggaacccctcctggaactccccggccccctgatacccctctgcctgaggaggtaaagaggtcccagcctctcctcatcccaaccaccggcaggaaacttcgagaggaggagaggcgtgccacctccctcccctctatccccaaccccttccctgagctctgcagtcctccctcacagagccccattctcgggggcccntccagtgcaagggggctgctccccgcgaatgccagccgcccccatgtagtaaaggtgtacagtgaggatggggcctgcagtctgtggaggtggcagcaggtgccacagytcgccacgtgtgtgaaatgctggtgcacgagctmasgcttgagcgacgagacctgggggtttgtggagtgccaccccaactagcatggagcgggttttgaggaccangatccctgttgaagtgcagttgctggccctgggggagntagccgttcgtttccggaaatttggcaagtaggatttttaaggttccaaattct

SEQ ID NO: 5 - DNA, 393 bp, Homo sapiens
  misc_feature (273): n equals a,t,g, or c
  misc_feature (274): n equals a,t,g, or c
ttttctctttgatgttctggccctgacttctgaaaccagtgttctggggagaggcatttgagagtgacccagggcctgggaaccggggcttttctcggtggtcttaggcctgttctgcaaccaaggcaaggccaggatttccggaaatatgaggaaggctttgacccctactctatgttcaccccagagcagatcatggggaaggatgtccggctcctacgcatcaagaaggagggatccttagacctggccctggaaggcggtgtggactcnnccattgggaaggtggtcgtttctgctgtgtatgagcggggagctgctgagcggcatggtggcattgtgaaaggggacgagatcatggcaatcaacggcaagattgtgacagattacacc

SEQ ID NO: 6 - DNA, 539 bp, Homo sapiens
  misc_feature (486): n equals a,t,g, or c
gctcgtgccgctgaaatgacttccacggctgggacgggaaccttccacccacagctatgcctctgattggtgaatggtgaaggtgcctgtctaacttttctgtaaaaagaaccagctgcctccaggcagcmagccctcaagcatcacttacaggaccagagggacaagacatgactgtgatgaggagctgctttcgccaatttaacaccaagaagaattgaggctgcttgggaggaaggccaggaggaacacgagactgagagatgaattttcaacagaggctgcaaagctgtggactttagccagacccttctgccctcctttgctggcgacacttcttcaaatgcagatggttgtgctcccttgcctgggttttaccctgcttctytggagccaggtatcaggggcccagggccaagaattccactttgggccctgccaagtgaagggggttgttccccagaaamtktgggaagscttctgggntgtgaaagacaytatgcaagytcaggwtaacatcasgrgtscccggttgttgc

SEQ ID NO: 7 - DNA, 804 bp, Homo sapiens
  misc_feature (758): n equals a,t,g, or c
  misc_feature (759): n equals a,t,g, or c
  misc_feature (771): n equals a,t,g, or c
  misc_feature (802): n equals a,t,g, or c
aattcggcacgagttcaacaccaagtgtccctctggcagttgtgtgatgaatcagtatctgagttcaaaattcccaaaggatttcagtacatcttgccgtgcacattttgaaagataccttttatctcagaaaccaaagtgcctgctgcaagcacctattcctacaaatataatgacaacaccagtgtgtgggaaccaccttctagaagtgggagaagactgtgattgtggctctcctaaggagtgtaccaatctctgctgtgaagccctaacgtgtaaactgaagcctggaactgattgcggaggagatgctccaaaccataccacagagtgaatccaaaagtctgcttcactgagatgctaccttgccaggacaagaaccaagaactytaactgtcccaggaatcttgtgaattttcacccataatggtctttcacttgtcattctactttctatattgttatcagtccaggaaacaggtaaacagatgtaattagagacattggctctttgtttaggcctaatctttctttttactttttttttcttttttctttttttttaaagatcatgaatttgtgacttagttctgcccyttggagaacaaaagaaagcagtcttccatcaaatcaccttaaaatgcacggctaaactattcagagttaacactccagaattgttaaattacaagtactatgctttaatgcttctttcatcttactagtaaggcctattaaaaaaaataataccacttgannggtgaaggcttngcaataggaagaagatagaatccaggtttangg

SEQ ID NO: 8 - DNA, 720 bp, Homo sapiens
  misc_feature (714): n equals a,t,g, or c
gtgaggacagcctgccagagtctggtctctggacactatgggcacacgactcctcccagctctgtttcttgtcctcctggtattgggatttgccccacgggctctcctgacacactctccccctgcagaggtccaggggacccaacagccccagcaagatgagatgcctagcccgaccttcctcacccaggtgaaggaatctctctccagttactgggagtcagcaaagacagccgcccagaacctgtacgagaagacatacctgcccgctgtagatgagaaactcagggacttgtacagcaaaagcacagcagccatgagcacttacacaggcatttttactgaccaagttctttctgtgctgaagggagaggagtaacagccagaccccccatcagtggacaaggggagagtcccctactcccctgatcccccaggttcagactgagctcccccttcccagtagctcttgcatcctcctcccaactctagcctgaattcttttcaataaaaaatacaattcaagttgcttctcatggatggcactgcttttctgaggactcaaggtgccaagatggaggggctgactcagtccagccaacatttaatgagcacctactttatgtatggagctctaacccatgggtccatgggaataaagcagtgaatagtaacaataaataattgtaacagcaaaaaaaaaaaaaaaaaaanaaaaaa

SEQ ID NO: 9 - DNA, 540 bp, Homo sapiens
  misc_feature (463): n equals a,t,g, or c
  misc_feature (524): n equals a,t,g, or c
  misc_feature (535): n equals a,t,g, or c
ccaacagagatgtatccagagatccacagttctggaggctgagaagtctaaaatcaaggcaccagcagattccacatctcgtgaaggctcactctctgcttcacagatggcactgtcttgctgtgttctcacatggcagaaggggcaaacaagcccccctgggcctcttttataaaggcactaactctatgcctaaaggcagggccctcatgactctatcacctaccaaaaggctccacttctttatactattggaggggtagaaggaacttcctttctagaccttgaaggtttaagaatttgaatctataaaacaagctgacaatagacagattaacaggagaaaaagcatatacattttttaatgtgggccagatggcagaagcttaaataacaccccaagctacagggaagtgaggcctctgatgggggaggtagttgacacaggctgtggggaggggtnagggggaggaatctgtggtggagcaaatttgccttattacactgataaatggtaatttacnctaattaagcntgggt

SEQ ID NO: 10 - DNA, 561 bp, Homo sapiens
  misc_feature (406): n equals a,t,g, or c
  misc_feature (450): n equals a,t,g, or c
  misc_feature (546): n equals a,t,g, or c
agaatgtcactgagtggcctgaaccaaagctcatggatactggagatgaagaaccagcaggagaccccaggtgtgctctcatccgtactctgtgacaccccttagtggactgttccaaccagttgggcccgggagaaggactagggaagcttccttcccatctgcacctcccagcctggagaggagcctgtgacttgccctgttccttggctcctcaggctggggtaaggtgtgggggtggctccagccttgaggccagtctcctgatgctggattccttgttttccctgcaggcatcaaacagaaaggccttttgctaagtagcagcctgatgcactccgagtcagagctggacagcgatgatgccatctttacatggccagaccgagagaagggcaaactcctngcatggtcagaatggctctgtacccaacgggcagacccctctgnaaggccaggagcccgcgggargagatcctgtagccacctggtctgtctyctcagggcarggccaggcacaattgcccggccagttcttctaacttnccgagttttgcgggg

SEQ ID NO: 11 - DNA, 393 bp, Homo sapiens
  misc_feature (346): n equals a,t,g, or c
  misc_feature (381): n equals a,t,g, or c
  misc_feature (383): n equals a,t,g, or c
tcgacccacgcgtccgggtgagtgccatcttaaaacttactggagattggttttatatttagatttatataactggttatgtgaatatatttaaatactggggaaattgcttcactgtcttagaaccaagcaagattcacctgtgttttgtgttcatgttcatttgcctcttaaaggcaagggttgaagataaataaggtagcaatgtctatagttttggccttaactatgccaatctaattataattccctgtatttaaaatggtttcttttacttattgaaaggcattttagtgtggtktatgtgtaatattaaagattattcaacacctctcaraaaaaaaanraaaaaggggggccccccctgggggtcccaagctnancgtacgcggg

SEQ ID NO: 12 - DNA, 322 bp, Homo sapiens
taagaatacaaaattagccaagcatgctggcacatgcctgtaatcccagctactcgggaggctgaggtacgagaatcgcttgaacctgggaggcagaggatgcagtgagccgggatcacgccattgcactccagcctgggggacaagagtgaatctgtgtctcaccaaaaaaaaaaagaaaaagaaagatgcttaacaaaggttaccataagccacaaattcatraccacttatccttccagtttcaagtagaatatattcataacctcaataaagttctccctgctcccaaaaaaaaaaaaaaaaaaaaaaaaaaaaaaag

SEQ ID NO: 13 - DNA, 1907 bp, Homo sapiens
  misc_feature (1834): n equals a,t,g, or c
  misc_feature (1843): n equals a,t,g, or c
  misc_feature (1888): n equals a,t,g, or c
gagaaataataatatagctttatagaattttccatcttgtattaaaataatcacatgtacatcattgtaactcagtccataacataagattttgtacaacaatttctttttgtgtgctggcatcattaaggtttagtctgcccagatcacctattagtacctaatttatatattctgaattaaaattatctgttaatttaaaaacattttatctattgtctttcaaaatagtattaactgagggtttttttgtgtgtgtttttctattttgcttggctttttgaacattactggactctcgttttagaaggaaaaacctttcagctctactctcacaatcttatagctttgtttgaacatgccaaaaaaccaggattagctgcccatattcaaactcacaggtttccagaccgaatactaccaagaaaattcgctttaacaacaaagattcctgatacaaaaggctgccacaaatgttgcatagtcagaaacccttacacgggacataaatacctctgtggagctttacagtctggaattgttttacttcagtggtatgagccaatgcagaaattcatgttgataaagcactttgattttcctttgccaagtcctttgaatgtttttgaaatgctggtgatacctgaacaggaataccctatggtctgtgtagctattagcaaaggcactgaatcgaatcaggtagttcagtttgagacaatcaatttgaactctgcatcttcatggtttacagaaattggtgcaggcagccagcagttagattccattcatgtaacacagttggagagagataccgttttagtgtgtttagacaaatttgtgaaaattgtaaatctacaaggaaaattaaaatcaagtaagaaactggcctctgagttaagttttgattttcgcattgaatctgtagtatgccttcaagacagtgtgttggctttctggaaacatgggatgcagggtaaaagcttcaagtcagatgaggttacccaggagatttcagatgaaacaagagttttccgcttattaggatcagacagggttgtcgttttggaaagtaggccaacagaaaatcctactgcacacagcaatctctacatcttggctggacatgaaaatagttactaagcaacagaaactgatctcaaatgacaggaaaatgaatatactccattgaaaggaaaaataaggaaattcaatacaaactgcactatgatttgctttaactattatgggttatattgcaaatgatctgtactttagggtagaattcaatattttctgcagctggaaacagctagtctatctcttgccactgtgtggtggttatatcaagtttgcttaataaaagctatgagacaaatagtcctctagttccaggaaacacagtctttttttaaaaaaaacaatgtttgtaacaagggtgccatggtatttttagataactcgtgattatcttaagagaggtaaatttagtgatcattttatatcatgtcttattccttcttaatgaacataatttgttaaattctcaagcaaggttttcacttttatattggccattctgtatgtttttgtaaaacagaatatttaatccttatttattaatctcttgctggagtggtgtaatgtatctaacttttagcaaaggagggttgcagagcagcttaaattttttttataatgtataagaattttgtttatcttttaagagtagtaaagtactttgagtgtttgggggtcaacacacacatgcaatttgcttaacaaaagtattttataatacagttcatacagaataccytaaaagggagcytangtttccacnacagataagtggtaagggtcataccggagataatgatgatagtgnaatatcctagaagggggtg

SEQ ID NO: 14 - DNA, 1140 bp, Homo sapiens
agaataaattccagggcttcagtctgcctttggttcgcaagtttgcccactcgattctgcagtgcttggatgctttgcacaaaaacagaataattcactgtgaccttaagcccgagaacattttgttaaagcagcagggtagaagcggtattaaagtaattgattttggctccagttgttacgagcatcagcgtgtctacacgtacatccagtcgcgtttttaccgggctccagaagtgatccttggggccaggtatggcatgcccattgatatgtggagcctgggctgcattttagcagagctcctgacgggttaccccctcttgcctggggaagatgaaggggaccagctggcctgtatgattgaactgttgggcatgcctcacagaaactgctggatgcatccaaacgagccaaaaattttgtgagctccaagggttatccccgttactgcactgtcacgactctctcagatggctctgtggtcctaaacggaggccgttcccggaggggaaactgaggggcccaccggagagcagagagtggggkaacgcgctgaaggggtgtgatgatccccttttccttgacttcttaaaacagtgtttagagtgggatcctgcagtgcgcatgaccccaggccaggctttgcggcacccctggctgaggaggcggttgccaaagcctcccaccggggagaaaacgtcatgaaaaggataactgagagcaccggtgctatcacatctatatccaagttacctccaccttctagctcagcttccaaactgaggactaatttggcgcagatgacagatgccaatgggaatattcagcagaggacagtgttgccaaaacttgttagctgagctcacgtcccctgatgctggtaacctgaaagatacgacattgctgagccttactgggttgaaaaggagtagctcagacctgtttttatttgctcaataactctactcatttgtatcttttcagcacttaattttaatgtaagaaagttgttcattttgtttttataaaatacatgaggacaatgctttaarttttaaaaaaaaaaaaaaaaaaaaaaaaaaaaaaaaaaaaaaaaaaaaaaaaaaaaaaaaaaagggcggccgctcgcgatctaga

SEQ ID NO: 15 - DNA, 2008 bp, Homo sapiens
gccaggagaccctgaaacatgaaaccaaacaggctttgatatttttttttttttaattactttccccttttgcttgattcttcttccttggtatcatattcaaaggaggaaagaatggatgacacttagggacaggtcactaagcagaataggtattagttggttttttattatttttaaatttatatagctctcatgtattgaaggtgctactttaaaaactgtgttaatgtacttgcaaatctcctgctggctcatgaaacagcagaattccagccaaggcaaattcagttggatctagggcttgaaaactgcccaagattaaagagctaagatgaaatagtttgaataaactggtaaaataacaattcatactatctctacatatttttaggatatgaatttttttttcctgctgggtagattgtccagtgacttatggcatgaatttcttttcatgctaccttcaatcttcaactaaagatttctaaaaggggtaagaaatgaggcagtagtttattaaatacatagaagtacacagctattatatgctgtggctttgagaagttaacttttgtggaatatgaaaccaaaggaagaatttccatgtagataaattaagaatagggaaaaacatctacctaaaagatggttgtccctaaaaaactggaaacatctgaaatgctctatttatgttattattcctgggagcttatagcccattatttttactttttttttttaattcagaagactagaacagaacttaaattttacaaacttttgatcataatgcttttgcccatactgtctcgtccttagccccagtgacatgtgctgatcctcctgcctttagttctaaatggttctgaatagctttaaaagatgaataagaaaaaagatcaagctcttttgaggctagagggctcatatggagatctaaaaccctccatgttcatttccagacttggtcaggcacatacatagtaaattataatcaatcatgggaattacataaggataatgaggcccaactgaaaccaagtttcagtctgccttacctttacccgtccttgagaacagcggtccaggagaatcaggcagtctgtggcctcctgtagcagggcgctcttaacagactcaggtgtaaggtttggatcccttgctacatcacaaatcagtttcaagagggccttcagtaagaccacaagtctgcaggaaactctggaatcaggaagaaaagctatgttcatactctaaatctggatattaaaattggaagagacttcaaagactgtcaagtggaaagctatcatttcctaaattaaggaacttaggtcaaagttaaatgaaaaagacctaaaaacagaaccaaagacagcctctagatttcttaccctcaagtctcctgttagcatactgcctatacacacagacacaccctctgccacactgctctcttccttccagaagcttggttctactgtaagcaacagctccttcatgggctgagaaggggaaaccaggatctccccaaccaagggcctatacttttatttttcaactctattaactgaactatgcttggagagagccctgaatcctttaactttaatgccatcttaggcctggaagttagagtgagggaaatgagcttggcttctgggactgtgtcaagttgaattttctgtcatttaatttcagatcctagctcatcatcagtgaagtccagcctacttacttgtaactattaacctttctaaaagttttcatcgccttggtaaagctccagaaatggacaatgctagtgactgcacaatattgtgactgtacttaatgccactgaactgtacactttaaaatggaaaatttatatgtatttttaccacaataaacaaaaaaccctaaaaaaactttaatgaaaggtggaaaataatttaacttayaatgtgaaaatacaatgtgaaatgtacaataaatcatatttatggcaaaaaaaaaaaaaatt

SEQ ID NO: 16 - DNA, 371 bp, Homo sapiens
  misc_feature (350): n equals a,t,g, or c
  misc_feature (360): n equals a,t,g, or c
agagagctagagggactaggagataatgtgtatgtaggtttatgtgatgggatatcaccctgaagagttgtgtcttttgtggccagtgacaaatccaggaaatgaatgttgctgatagggataaatcttgaggctgagggcgggtggtacagatgtgtatgggaaaccccaacccctatatattgtaaatagatgggctgggctaaacattgttgccgtttcatacttctaccaactcagcttttacacaataaagctctactgtctctgaaaaaaaaaaaaaaaaaaaaaaaaaaaaaaaaaaaaaaaaaaaaaaaaaaaaaaaaaaaaaaaaaaaaaaaaaaaaattngggggggggnccccccccccc

SEQ ID NO: 17 - DNA, 763 bp, Homo sapiens
  misc_feature (6): n equals a,t,g, or c
aaaaanaaaaaaaaaaaaaaaaacggaaataaagtttaaaaaatcaatcaacatggcctttaattttaacaattttaacagcaagtggtggggggagttctcagatgagcaactggagctggaagcacttctgtggtcaagcaggcagcccatggggttgcatcttcctgttgggggatcatccattttcttcaatgaatagttttaagtcttgtcaaatgctcacacagaggcccgctattaaggaggcagacaggcaacattcaatacgaaggcaggacaagctcagccccgctccttcattcgggcatgtgtcattagggatgacattctctgaaggctgcccggcttgaatggccaaatccctgcatcatggctttctttaattccctctgctcccaactcacaaaatgaggacctctcttttaagacgaraaaggcactgttcctcaaaggtatacatttggaacttcaataatgaaagcatctcttgcttggcaggtggaatataggcaattttggatttttaatgcatggcatggggcgggagtgaaatatcttgccagggcttgtttgccctataatgggagagaaccaggcctctggatgatacggtatcaaacactgctgctcctttctgttttcttttgtgggaaagggaggaggatagaatggagaggaattagtgggagcctgggggaagttcaaaataaagaaactgtgaaatcctccacctcaaagttgggtctgcaccaggattctg

SEQ ID NO: 18 - DNA, 1926 bp, Homo sapiens
  misc_feature (898): n equals a,t,g, or c
  misc_feature (1024): n equals a,t,g, or c
  misc_feature (1083): n equals a,t,g, or c
aataacttgactggaattctagaaaccgctgtcagagccaccaacgcacagtttgacagtcctgagatcctgcgaaggctggacgtgcggctgctggaggtctctccaggtgacactggatgggatgtcttcagcctcgattatcatgttgacggaccaattgcaactgtgtttactcgagaatgtatgagccactacctaagagtatttaacttcctctggagggcgacggatggaatacatcctcactgacatacggaagggacacatgtgcaatgcaaagctcctgagaaacatgccagagttctccggggtgctgcaccagtgtcacattttggcctctgagatggtccatttcattcatcagatgcagtattacatcacatttgaggtgcttgaatgttcttgggatgagctttggaacaaagtccagcaggcccaggatttggatcacatcattgctgcacacgaggtgttcttagacaccatcatctcccgctgcctgctggacagtgactccagggcacttttaaatcaacttagagctgtgtttgatcaaattattgaacttcagaatgctcaagatgcaatatacagagctgctctggaagaattgcagagacgattacagtttgaagagaaaaagaaacagcgtgaaattgagggccagtggggagtgacggcagcagaggaagaggaggaaaataagaggattggagaatttaaagaatctataccaaaaatgtgctcacagttgcgaatattgacccatttctaccagggtatcgtgcagcagtttttggtgttactgacgaccagctctgacgagagtcttcggtttcttagcttcaggctggacttcaacgagcattacaaagccagggagcccaggctccgntgtgtctctgggtaccagggggcggcgcattcccacacgtgaarctcgcggtcctcccarggagctgcgggtgatgttcgttgcactgctagacacgaaattcccattgacgtcctgcaggaactnatkrctgcaggtgtcctgcccttccgcccacgagtgcgccatgtttcagcggaggccgntgtgggagaagccacgtcgtgtttcamatgtcggagtcgaatgcatttktaaatccctaagtcaagtaggctggctgcactgttcacatttgtctctaaaagtcttcatcgctaaaagataccataatttgctgaggcttcttaagctttctatgttataatttatatttgtcactttaaaaaatccatttcttttagaaaaaattagggtgataggatattcattagttaagatggtaacgtcattgctatttttttaacatcctctttagaggtaatttttgttaacataaccaaaaattaaattgaaacaaaatgtcccaactaagaaaatatatagagcattttatttttttttagtgttgtaaaatattaacctctgtgagatcctttgtatcttaatgcattacctttacacatatttattcttattttctctcctttcagagtttacatttttatatttaatttactatttcagatttttaaaatagtatagaaaaaagtaggagtgatagagaacaaaaatactcttatacagtgcaacccaaataccgcgaatgcatcagctaaagcagcgtgtaaataggagtgacgagaaagttaatggagtattttattttcaaagttcctgataagcattggaaagaaatcgacatggataatgaagatttcctttttccttgcctattttttcattgtaaatatttatatactactgmccaagatgttggggtgggggggattgttttttgtaaaaatgtcattatcaggtcacataaatctgcctttatgttgcataagtgaaaatttagaaaattaaaagcaattatctttmagaaa

SEQ ID NO: 19 - DNA, 2301 bp, Homo sapiens
  misc_feature (190): n equals a,t,g, or c
  misc_feature (2052): n equals a,t,g, or c
tcttatcacatctaagccttaccaggtagagaaggtactaaatacactttagaagtaaaaatatgaagtaccgagaggctaaacccactggcctaagatctcaccaaagttcatgaaaaccaggactaggacccacggctcccaaagcccgttcttgctgtgttgtgctgcctccatatccgtcagaagnagcctttccagaatgattctgggcatatactaagaagagcaggtatggaaagatctattgtcagggaatcttagaattccctacacgagtgggagaaagatgtccaaattccttacgcatggtattcatgatggtgccctatctaagtccaggactgttttcctacagcgtgcctcaaaagtgttgtagagggcaggattctacattcacagcctgttccatctacgagattttccagatgctacttgtggtagacattcctaactcatggtacttagccaccagagatcatgatggaatgagtgggtggcttttctacctgccattccctcagaattcatgargggtgggggacagggggaccggaattgtcttagcaccccaatgttatgacaaaactatgctactttagaaacgcagtctgtttttcaccaattgacatactactgatctgaagtaaccagtgccatcataagaaattactgcattaagaaaatccttgctgtgccctttgaaaagctgttcagaaatcatttacagtgatctttcatctcggtcgctgtagtgaacattttagtgtgataaatttcaaaattctaaacaaattacccacttttatattggaaatctctaccagaactccctcttcatttttwaaggcatacatttgcttgttttcaagatcaagaattctgagctagctttaagtagcaaactgatttatatgtgcaattataggatgcattaagatgaatgatagcctttacatattgaaaactttgcagacgttttgttttgaaaatggcattgtatagtaaatgcaaattaattttgtaaaattatgttaaagagtatgttcagacactttctgccatggccaaaaagtatgtatgaaagtatgtgtgtatttgtttgtaaaaggatgccaatgttttacctgatatcttagtgacacttcagttatctatgcattctttagatctgtgattcggtaaacaggcagccatgttcacgatgccttctatgtcttaccatatttttaattaacctgttaaatacagcttaaaatatttttattttatttattctatttttactgaaatatactgcattattgtgttaatgtattatctttcctggatattatctcccagtgtatccagatctaagtaatctcagtgaactatacattgcctaaaaagtggttttgtaatgatttgtagtcacatttctattgggatatgtagaagaaaaggcaaaatgcttaaagttccttttattttttaaaagcagctagatagacacagacttgccacctcatacatctgctccttggcaacatcaaggggaacgactagccaacatgcctatggctaaaaactttcctttgcagactaaagcactgcttggtgcttcgtttttctacccttcacaacatgtgtgatttcatctaagagatatatacatgtacacatgccctttgtttccacctggatacaagatcactcatagctaattaggaccattgttttttgttcatctgtcttgttgcatgaagggacattagacccatttccattaaaataagttcttggtgataaactgtggcactgctacttctttttaaatccactttatgatttcaagatggacacttgtaagatgactcgacacaaggccattgcctggaagccccagagctttcctctgtttgtatggcccgttcatgtcccaggcattgcaacacaaactcaagatttcaccacaacatgacaagcattttcctaactgatattagcacaatttaactaataagccccttcgctctctagttggccaggcttaacctaatacacatctanactgtgtgccacacggccagtagaaagtttaacttcagcttcagggcaaagatacccactcacaccgtgtcaacgcaagcagtagttcctggcctccagagcagcttacttcccctgaaagaacgctttgttttcctttatgcccttttcctgttgaccacttttacacatttaaatgtaatttgttgtgagaataaatttagctgcataaaaaaaaaaaaaaaaagggcggccgctcgcgatctagaa

SEQ ID NO: 20 - DNA, 538 bp, Homo sapiens
  misc_feature (507): n equals a,t,g, or c
  misc_feature (514): n equals a,t,g, or c
agaggccgccaacatgatcctggtggatgatgacttctcagccatcatgaatgcagtggaggaaggcaagggtattttttacaacatcaaaaactttgtccgattccagctgagcacgagcatctccgccctgagtctcatcactctgtccaccgtgttcaacctgcccagccccctcaacgccatgcagatcctatggatcaacatcatcatggatgggccaccgggcagaggtgaggcagggcggctgggagccctgtgtctctttacctacctgcggggcttcctccaggggctgctggctgtgcccaaggctatagggatgaacaaatacagccactttccatcaggagttcccagaaaactgaagtgtgttgcactggagtgagactgggagtagaaggcagaggagaaagtacctgggccggcagagctgggtgaggatggaactttctgcttcctctggctggatgctctctctgggcaaacctgcatgggttaattctnatgcttnaatttcaagtcacccagtcactgg

SEQ ID NO: 21 - DNA, 1403 bp, Homo sapiens
  misc_feature (1370): n equals a,t,g, or c
  misc_feature (1386): n equals a,t,g, or c
  misc_feature (1393): n equals a,t,g, or c
ggcacgagtggccacatttccagtacccagtagtcatctgtgccagggggttatccaggtacagaacattcccatcgttgcagaaggttctatcagctagcactgggttggacgacacttgccaagacgagctggctagaggatrgttctccggacctggtcccacgtggttcccagctggctggaggcgtgatcctgggtgtggccctgtggctccgccatgacccgcagaccaccaacctcctgtatctggagctgggagacaagcccgcgcccaacaccttctatgtaggcatctacatcctcatcgctgtgggcgctgtcatgatgttcgttggcttcctgggctgctacggggccatccaggaatcccagtgcctgctggggacgttcttcacctgcctggtcatcctgtttgcctgtgaggtggccgccggcatctggggctttgtcaacaaggaccagatcgccaaggatgtgaagcagttctatgaccaggccctacagcaggccgtggtggatgatgacgccaacaacgccaaggctgtggtgaagaccttccacgagacgcttgactgctgtggctccagcacactgactgctttgaccacctcagtgctcaagaacaatttgtgtccctcgggcagcaacatcatcagcaacctcttcaaggaggactgccaccagaagatcgatgacctcttctccgggaagctgtacctcatcggcattgctgccatcgtggtcgctgtgatcatgatcttcgagatgatcctgagcatggtgctgtgctgtggcatccggaacagctccgtgtactgaggccccgcagctctggccacagggacctctgcagtgccccctaagtgacccggacacttccgagggggccatcaccgcctgtgtatataacgtttccggtattactctgctacacgtagcctttttacttttggggttttgtttttgttctgaactttcctgttaccttttcagggctgacgtcacatgtaggtggcgtgtatgagtggagacgggcctgggtcttggggactggagggcaggggtccttctgccctggggtcccagggtgctctgcctgctcagccaggcctctcctgggagccactcgcccagagactcagcttggccaacttggggggctgtgtccacccagcccgcccgtcctgtgggctgcacagctcaccttgttccctcctgccccggttcgagagccgagtctgtgggcactctctgccttcatgcacctgtcctttctaacacgtcgccttcaactgtaatcacaacatcctactccgtcatttaataaagaaggaacatcaggcatgctaaaaaaaaaaaaaaaaaanksgggggggggcccgntacccanttggcccaat

SEQ ID NO: 22 - DNA, 478 bp, Homo sapiens
  misc_feature (474): n equals a,t,g, or c
  misc_feature (475): n equals a,t,g, or c
  misc_feature (476): n equals a,t,g, or c
  misc_feature (478): n equals a,t,g, or c
gagcagaaagtagatgcttaatggcagtgttctctgacccagacatgaatcagaatcacctggaagggcttgttaatacaaattgctaggccacaaccctaaagtttctgattcagggtagggcaaggcgaggcttaaacttcaggccaggggccactttaagaattgctatatggccagggccgggcgcggtggctcacgcctgtaatcccagcactttgggaggccgaggtgggcggatcacaaggtcaggagatcgagaccatcctggctaacacggtgaaaccctgtctgtagtaaaaatacaaaaaaattagccaggcatggtggtgggtgcctgtagtcccagctacttgggaggctgaggcaggagaatggtgtgaacccaggaggtggagcttgcagtgagccgagatcgtgccactgcactccagcctgggcaacagagcgagacttccgtctcaaaaaaaaaannncn

SEQ ID NO: 23 - DNA, 1252 bp, Homo sapiens
  misc_feature (1227): n equals a,t,g, or c
tttcgagctctgcaccgaggagctgccctggacttgagtcccttgcatcggagtccccatccctcccgccaagccatattctgttggatgagcttcagtgcctaccagacagcctttatctgccttgggctcctggtgcagcagatcatcttcttcctgggaaccacggccctggccttcctggtgctcatgcctgtgctccatggcaggaacctcctgctcttccgttccctggagtcctcgtggcccttctggctgactttggccctggctgtgatcctgcagaacatggcagcccattgggtcttcctggagactcatgatggacacccacagctgaccaaccggcgagtgctctatgcagccacctttcttctcttccccctcaatgtgctggtgggtgccatggtggccacctggcgagtgctcctctctgccctctacaacgccatccaccttggccagatggacctcagcctgctgccaccgagagccgcactctcgaccccggctactacacgtaccgaaacttcttgaagattgaagtcagccagtcgcatccagccatgacagccttctgctccctgctcctgcaagcgcagagcctcctacccaggaccatggcagccccccaggacagcctcagaccaggggaggaagacgaagggatgcagctgctacagacaaaggrctccatggccaagggagctaggcccggggccagccgcggcagggctcgctggggtctggcctacacgctgctgcacaacccaaccctgcaggtcttccgcaagacggccctgttgggtgccaatggtgcccagccctgagggcagggaaggtcaacccacctgcccatctgtgctgaggcatgttcctgcctaccatcctcctccctccccggctctcctcccagcatcacaccagccatgcagccagcaggtcctccggatcacygtggttkggtggaggtctgtctgcactgggagcctcargarggctctgctccacccacttggctatgggagagccagcaggggttctggagaaaaaaactggtgggttagggccttggtccaggagccagttgagccagggcagccacatccaggcgtctccctaccctggctctgccatcagccttgaaagggcctcgaataaaccttctcttggaaccactccaagcccagctccactcagccttggccttcacgcttgtggaaacanccaaggcattcctccacccctcaag

SEQ ID NO: 24 - DNA, 1074 bp, Homo sapiens
  misc_feature (928): n equals a,t,g, or c
  misc_feature (934): n equals a,t,g, or c
  misc_feature (1028): n equals a,t,g, or c
  misc_feature (1031): n equals a,t,g, or c
gctggcctttgctctgcggactggcggccccctggcacagaggtgacatctcaagggcccaggcagccctcttctagtggtgccaagaggcggaggctgcgggctgcccttggtccccagcccactcgctcagccctgaggtttccctctgcttccccagggagcttgaaggccaagcagtccatggcgggaatccstggtagggagagtaatgccccatctgtgcccactgtctccctgctgccgggggcgcctggaggcaatgccagctccaggacagaggctcaggtgcccaacgggcaaggcagcccagggggctgtgtctgttcaagtcaggcttccccggcccctcgcgcagcagcgcctccacgggcagcccggggccccaccccacgcactgaagaggccgcctgggctgccatggccctgaccttcctgctggtgctgctcaccctggccacgctctgcacacggytgcacagaaacttccgacgcggggagagcatytactgggggcccacagcggacagccaggacacagtggctgctgtgctgaagcggaggctgctgcagccctcgcgccgggtcaagcgctcgcgccggagacccctcctcccgcccacgccggacagcggcccggaaggcgagagctcggagtgacggcctgggacctgccactgtggcgtgcggctcctccccgcgccgcgaggccgcgacctctgccacgtggaccgcgcgcggggcgctccctggtggcgatggcgcggcactggccgagcactgcgggggctttcctccttgttggttgctgagtgggcggccaaggggagaaaaggagccgcttctgcctcccttgccaaaactccgtttctaattaaattatttttagtagaaaaaaaaaaaaaaaaaaaaaaaggcggccgtttanaggatncctcgaaggggcccaagttaacgcgtgcatgcgaagtcataactctctccctataatgatcgtattataagtaagcactggccgtcgtttttanaangtcgtgaatggggaaatttgctaactttgggaactttttgaaa

SEQ ID NO: 25 - DNA, 1186 bp, Homo sapiens
tatcagctcaagccttacaccayccacctcatcaaggacctccactttttccttcgagtgctcatccaactgtaccaccgtatccctcacaagctacacatcataccactttgggaccgggaccccagcaccagccttctggaacagggccacattgtccattacctgtcacaggtcctcatctccagccccaaggaccaaacagtattccaacacctactgcttcagggttctgtcctcatcctggctctgtggccctgccacatggggttcaaggacctcagcaggcatctccagtgcctggacagattccaattcacagagcacaggtgccaccaacatttcaaaacaattaccatgggtcagggtggcattaaaatggactccaaaaacatttttttaaatgttctgtaagataaactgtatatttcatatgtacctgttaaggtactttttaaagcttgtacatgaacctttgtataaaaaacaccagtgctctttcgttgtatttttctcatttttgctttttaaaattcctttaaaaaatgtgctgttaagccagtattaggtatctttattttgtaagtgaacattccagctgtttttttctggcagatctgatgctgatttgatgctgtatgatcttttttttttttttagttaaattcatttagtgaatgttctattattttatacatacacattaagtactcagctaagtaatggcactatgaggattttttttttctttcctgtcagcagcagttctgtgaatgcatcttaggtataaaaatgcaatacagatttttatattttggtgtggacatggctcattttgttttaccagttatttgcaagcaaaatgtaatttaatgtatagatgatttctaatgtctcctgacaaactgtaaatactgcatttcttttgcgtatataattgcttacagcttttctcatttgatatatagcattgtacatatgacaagtcttttgcaaaactgtgtgatctttgtgaaagtagtacagtatatgacctttaatttcttttttattttaaatatactgtcacactgaagcactggttgggcattttaattcatgttaataaatcacaattatgtcagttcccacgcgtccgcggacgcgtgggcggacgcgtgggcggacgcgtgggcggacgcgtggg

SEQ ID NO: 26 - DNA, 888 bp, Homo sapiens
  misc_feature (670): n equals a,t,g, or c
  misc_feature (675): n equals a,t,g, or c
gcccccacccgctgtgactgcattctgggatccccagcctgggaatccaagagctgtcggcccattttattcctccctcccagacctgaccccttcatcggggctcaagagacctctctctccaaatctccatttgcctcctctggctaagctggaaaatgcacactctgccctgggtgtttccatattatccgcctgcccttcctcctgggtgcctcccgtagccttagtaagggctctgctttcctgggcccctagagctgagccatgctttgccataaaggtgctcccggcttgcaaccaatgtgtctgcttgtgcatctgtctgtgggtgtggtggggagggaggggaccaggtgggtactggcactctggggtccggactttatgtccatggaggccccaattgactcagttcaagggtcactgaggctttgctgatgtagggagagggccagagggaggctccaccccagccgggctgagccagggaacctgggacaaaggtcaggtggctgattccaggtagtgttttggagctgggcagtcagtggctgggcggggacatatgcccaagagccaccatgaactcccaggggcctccaggcaggggccctccatcccgcaccaagtctttcaacatgatgtccccgacgggcgacaactcggnctacnggctgagattaaggcaggcaagagcctgaagccgacgccccagagcaaggggctgaccacagtgttttcaggcatcgggcagccggccttccaggtaggcgggcccagcaggagcctgcgacccggcttccctggccctaggccaccgggcgctcagccccaccgcttctccctgcagcccgattcgccgctgccttctgtgtcacctgcact

SEQ ID NO: 27 - DNA, 789 bp, Homo sapiens
  misc_feature (420): n equals a,t,g, or c
gggtcgacccacgcgtccggttggtcttgtgtctataagaatgatcaagctgcaaaggataatccaactaaaagtcttcaggaagaagaaccatgtccaaggtttgcccatcagcttgtatacgatgagctacacaaggttcattacttatttggtgggaatccaggaaaatcttgctctccaaagatgagattagatgacttctggtcactgaagttgtgtagaccttcaaaagattatttactgaggcattgcaagtacctcataagaaaacacakgtttgaagaaaaggcccaagtggatccccttagtgctctgaaatatttacaaaatgatctttatataactgtggatcattcagacccagaagagacaaaagagtttcagctcctggcatcagctctattcaaatctggttcnagattttacagctctgggcttttctgatgtggatcacacctatgctcaaagaactcagctctttgacaccttagtaaatttctttcctgacagcatgactcctcctaaaggcaacctggtagacctcatcacactgtaactgaagagtcactggacacagaaatggaaaacaggagtcgattttccgtcytttggattgcagctccactgactgacagtaaagctgcagtgattgaggactgcaccagagttctgaagggatcttaaccatcacaagtttttaccctcttccttcatgcctgacctcaaccccgctctcctcatcctattcctaaattaggctaataaagtgaaattggtatactttcc

SEQ ID NO: 28 - DNA, 847 bp, Homo sapiens
  misc_feature (799): n equals a,t,g, or c
ctgtcctgagctgttcactgcttggtggctaccttctaagagtgagcatctcacaagcaggtgtcttaagtgaggaaatggaagctgcagcttcttaaacctgggaattagtagagcattacccctgctgtattctattagaggtcaagccatcactgaagccatattcaaggagagggatcgtgcacactcttccggaaatacgaccacatgagggctgccatcctggaaaaaatgcctcttgtggagcgagatggccctcaggctgatgaggaagcaaaggaaagcaaagaagcagcccagctttcagaagcagccccagtgcccacagagccccaggcctcacagctcctggatctgctagatctcctggatggggcttctggggatgtccagcatcctccccatctggacccctccccaggaggtgccctggtacacctgcttgaccttccctgtgtwcctccacccccagctcccatcccagatctcaaagtgtttgagcgtgarggagtacagctgaatctgtctttcattcgaccccctgaaaaccctgctttgctgttaatcaccatcactgccaccaacttctcagagggtgatgtcacccatttcatctgccaggctgctgtgcccaagagtctccagctgcagctgcaggcccccagtgggaacacagttccagctcggggtggccttcctatcacccagctcttcagaatcctcaatcctaacaaggcccccctgcggctaaagctgcgctcactacgaccactttcaccagtcggtgcaggagatntttgaggtgaacaactgcctgtggaatcgtggcagtaatgtctccaat

SEQ ID NO: 29 - DNA, 666 bp, Homo sapiens
  misc_feature (4): n equals a,t,g, or c
gganccatgggagtatgcacatgggatcataatccattctgtggtttggaaaaagaaaatgttaacctctgctttagagggtagctactagctttgttggggataaaagtgtaatacatgcacttttgaactctgaaagtttgccaatctgaaaaggggtgtttctgaagaccactatcttttacgaacacttaaaaataagtgtttgcagttgtgtatgggcacgatactgtattctttacatttttatggccctacagctacttcttatccctgcaagtatataaattaaaaccaagtcactttagaacagctttgaaactagagtttcaaaggtaaaaggatctcatgtttctgaatctgcgtaaagcaagatggctgtgatttgacaggtttaattgctagkttttataggtggatagaaatgaatagtttggagtctttaaaatgttttaaaaaatgtttgcttactatctatatatatgacattattcccaattagttttatatctccaagatatatatatgtatataggtatatacacatatgtatatatacatagtctatatattctatataagaatatattccaataagaatatattccatacgggaatatattagtcattgatgtattttgccggtaaaattaaaagatattttaa

SEQ ID NO: 30 - DNA, 517 bp, Homo sapiens
cgctcggcttcctgggtctggctgctgccgcccgccggtgtccgcccgtgtcgcgccggggcaccaaggagccgttggagggtccgggcggaggcccgctcgtgtggaagtcgtcgacgccgccgctcgtccgtcctcccgtccgttctcgctcccggccgccatcatgctggcgctcatctcccgcctgctggactggttccgttcgctcttctggaaggaagagatggagctgacgctcgtggggctgcagtactcgggcaagaccaccttcgtcaatgtcatcgcgtcaggtcaattcagtgaagatatgatacccacagtgggcttcaacatgaggaaggtaactaaaggtaacgtcacaataaagatctgggacataggaggacaaccccgatttcgaagcatgtgggagcggtattgcagaggagtcaatgctattgtttacatgatagatgctgcagatcgtgaaaagatagaagcttcccgaaatgagctaacataatcttctagataa

SEQ ID NO: 31 - DNA, 2675 bp, Homo sapiens
gcgaggtcacgtgacggagcgccggagcggagggagccggggctgggagttctcctgagggaagaggagtggagtaggggggacgcggcggcggcgttgacaatgagttttcttggaggcttttttggtccaatttgtgagatcgatattgttcttaatgatggggaaaccaggaaaatggcagaaatgaaaactgaagatggcaaagtagaaaaacactatctcttctatgacggagaatccgtttcaggaaaggtaaacctagcctttaagcaacctggaaagaggctagaacaccaaggaattagaattgaatttgtaggtcaaattgaacttttcaatgacaagagtaatactcatgaatttgtaaacctagtgaaagaactagccttacctggagaactgactcagagcagaagttatgattttgaatttatgcaagttgaaaagccatatgaatcttacatcggtgccaatgtccgcttgaggtattttcttaaagtgacaatagtgagaagactgacagatttggtaaaagagtatgatcttattgttcaccagcttgccacctatcctgatgttaacaactctattaagatggaagtgggcattgaagattgtctacatatagaatttgaatataataaatcaaagtatcatttaaaggatgtgattgttggaaaaatttacttcttattagtaagaataaaaatacaacatatggagttacagctgatcaaaaaagagatcacaggaattggacccagtaccacaacagaaacagaaacaatcgccaaatatgaaataatggatggtgcaccagtaaaaggtgaatcaattccaataaggctatttttagcaggatatgacccaactccaacaatgagagatgtgaacaaaaaattttcagtaaggtactttttgaatttagtgcttgttgatgaggaagaccggagtagcttcaaacagcaggagataattttatggagaaaagctcctgaaaaactgaggaaacagagaacaaactttcaccagcgatttgaatctccagaatcacaggcatctgccgaacagcctgaaatgtgaactgaacaggagaaaaaaagaaaagcmaaaaactcctgtwacccttgarattaagttcagcaggttaaagatggttgcagctggagggggcggaaaaaggccaaaactccatatatgttagtcttcctttatcttacagcgcaywtttattttatgatataatgaaatgttcgttcatgtatatacatttttaaaagtgctttctttgaaacactggaactttgttaagctgcctttttttttttaacttcctactttgatgataagcactcagatatatatcagcgtaaacatgaaaaattttcatgtgagtaggctggtatttgtaattttgctttctttctgcataatgttgattataaatcctctcttttcaggctaatgattacctcttattctctacatgcaaaaaattaaatattttgtgttcaaataaaattagaaaacytgagtggcctcttgtgtcctgcagagatttaaaacatggcatctcaatatttttgagaactacatttgtttttaacatatgtgtttgagaaaagcatatggagtgtttcaccgcaggcacttctgagtaccattccatggcttccagaattttatcctctttgaggtcttctgtgctatgaatattagatttctttccccaagggattatgtggcaggtcattatggccttcttttttttggccatattaagtaacagttttgctatattccagtagtaccgttgtgtgttttctgcaatgtggagttgacttagcttggcattttagatttgttaaaactattttttccataaatactttgaaacgtatttatatatttcaatttaaggaatctttttgccatgtgtatgcaaatattattttcttcatacattcattttcttttcaggggaaaattttgggatgggggactcaggaggacctgtgaagcatgtagttatctagatctgggtaatttcatgtttattaaactcgaactttggctagttaaactcatattgaaacttcatctagtctcttaattttttaacactaaattcaagtcatttgttttaagtctctaaaaaagaagattgcagtcatccattcatatgcatggggtctgatcgcaaatacactaaatgtggagtgtaggaaccaaaatgaaacctgctgtatggaaactactttcacttatggttcattggtttttgtaccaatattttttatgcacttcagtgcaagtcttgtcagttaaccttactttatgagtaagctaaataacccaaattacatttctttaaacctgttttactactatggcactttgataaaatggtcaggaaccaactttactggcaaaagggtccatgtaccaccatgtgctggagcatctgttctacatgtggatatcwatgaatggtaatgttttccttcatgtaagtgcctattcagagtttcagaattttaaaatgccaaatattttcatggtcatttgcatgtagtaagccagaaaatattcaaagagattttgaaaaccaattgtatttaaccagcctcaaattgtgcaaccatgatgtataataaagaatttgaaacaga

SEQ ID NO: 32 - DNA, 277 bp, Homo sapiens
  misc_feature (109): n equals a,t,g, or c
agccgcacccccagcacttcggacatggccgaggaaggcagagtggccagcgggggccccccagggctggagacctcggagtctctcagtgactcactctacgactcgntgtcctcttgtgggagtcagggctgaggggctgcgccacgccacggccccgctggagctggggaccacagactggaccggctctcttcatgcccagcccccggagacggggaccccttccctgaagggaccaaggaggcaggtggataagaaggttgaaaagggggtt

SEQ ID NO: 33 - DNA, 921 bp, Homo sapiens
  misc_feature (2): n equals a,t,g, or c
  misc_feature (839): n equals a,t,g, or c
  misc_feature (846): n equals a,t,g, or c
  misc_feature (886): n equals a,t,g, or c
cngtggctttcctgcaccactgccccccaccaggatgatggagagtaagatgattgctgccatacactccagcagtgcagatgccaccagcagttcaaattatcattcctttgtcactgcttcatccacctctgtggacgatgcattgcctttaccacttcctgtcccacaacctaagcatgcttctcagaaaacagtttactcctcctttgctaggcccgatgtcaccactgaaccctttggtccagataactgtttgcatttcaatatgactccaaactgccagtaccgtccccagagtgtacctccccatcacaataaattggagcagcaccaagtgtatggtgccaggtcagagccaccagcctccatgggtcttcgttataacacatatgtggccccaggaagaaacgcatctggacaccactccaagccatgcagccgggtcgagtatgtgtcttctttgagctcctctgtcaggaatacctgttaccccgaagacattccaccgtaccctaccatccggagagtgcagtctctccatgctccgccgtcttccatgattcgctctgttcccatttcacggacagaagttcccccagatgatgagccagcctactgcccaagacctctgtaccaatataagccatatcagtcctcccaggcccgctcagattatcatgtcactcagcttcagccttactttgagaatggccgggtccactacaggtatagcccatattccagttcttctagttcctattacagtccagatggggccctgtgtgatgtggatgcctatggacartccagttgagaccctttcaacggctttccantcgagantttgttttttacaatcctaggttgcaaggaaagagctttntacagttatgctgggtttgggtccaggtccccggg

SEQ ID NO: 34 - DNA, 1467 bp, Homo sapiens
aaaaaaaaaagaaaagttctgtgttgatgtacagtttctcctaagaagaagcgaggtggttgaattttggaagcacttcttgaatcggattaacccatgctcttattgaattttttcatctgctctgtttagtttgatattaaagcaaaattaagaggtcttagtttttcctatagaacttttaatatgtcaaaagctatattgtctaaatttcagtacttaagcaaatactgagtagtgttttaaattcagaaatagagcttctattatgaacacatgagaatgatttttttctcttaatcattattaaggaaatattttaatttcatggtcatataatggtgataagtaatacctgattgtttccttttctgttctagtaactcagaggagatacgtgttttatttgtgatagcaaattcctaaatgaacattaggcaagtggtatcattatcaggccagctgcagcctcttgccttgacctgcattcctagaatttctttgttgctgtaattcttgattaagtgaccttgactttcattttgtaattttgctaatcatcagcaaattcacttgcatgacgttactgccaaatatgaaggcagttgaattattatgagtgattgtggcagaggtttgtgccatggtgaaaactttgatgtttgtctgtgttcattggatccatctttttaaatgacattaccatgagtctgttgtcaaacctaaatatctttgtttgaatttaaaatgggactctatattgttgtagttcaggtcttcattgactaagagattgagagaaatctgacataagaaaatattgttttcactgcaggaataaagaggaagtaacagtgaatccaatatagttcatattgttattgtccaatcatcaagttaactaagcattatcagattacgtttatttctcatacatatggatattaacttaaggtaaaaaagctggatgtgaaggatctgaaaaggcattaatttatgtactaattctataaacatgtattaataattgcagtattattaaatacagatggactcaatgtacctttgaaaagaccactaatttagaaaacaaagctaagtgcagtcattacaagaagcaaagaaatacttaagttagaaaaaaattaaaatgaagggatggtctaagttttcttcatgctggaacaaatgttaaagaagcagtgattgcttacaatgtatgtgataaaataatacctttcacaatcaaaattttaatagtaaatataagataaaatttatattaaataatgaaaacgtatttgtactgaatttagtcactagagaacatcgtaacaaaatacatgaaacaaaagtagccagaaatgttagaacaggtggaaatgtatacattatttgatggtttgtttttttatggaaataaacaacatacatagaattaaatggtgatcaaaaacatggaaaaaa

SEQ ID NO: 35 - DNA, 2077 bp, Homo sapiens
  misc_feature (12): n equals a,t,g, or c
  misc_feature (15): n equals a,t,g, or c
  misc_feature (423): n equals a,t,g, or c
  misc_feature (730): n equals a,t,g, or c
cggacggtgggncgncgacacaatgggccayggagttcccgttcgatgtggacgcgctgttcccggagcggatcacggtgctggaccagcacctggaggcccccagcccgccgacccggaaccacaacgccggcccgtgttgatctacagcagcaaattatgaccattatagatgaactgggcaaggcttctgccaaggcccagaatctttccgctcctatcactagtgcatcaaggatgcagagtaaccgccatgttgtttatattctcaaagacagttcagcccgaccggctggaaaaggagccattattggtttcatcaaagttggatacaagaagctctttgtactggatgatcgtgaggctcataatgaggtagaaccactttgcatcctggacttttacatccatgagtctgtgcangccatggccatgggcgagaactcttccagtatatgttgcagaaggagcgagtggaaccgcaccaactggcaattgaccgaccctcacagaagctgctgaaattcctgaataagcactacaatctggagaccacagtcccacaggtgaacaactttgtgatctttgaaggcttctttgcccatcaacatcctccagcaaggaagctgccacccaagagagcagagggagacatcaagccatactcctctagtgaccgagaatttctgaaggtagctgtggagcctccttggcccctaaacagggcccntcgccgcgccacacctccagcscacccacccccccgctccagcagcctgggaaactcaccagaacgaggtcccctccgcccctttgtgccagagcaggagctgctgcgttccttgcgcctctgccccccacaccctaccgcccgccttctgttggctgctgaccctgggggcagcccagctcaacgtcgtcgcaccagctcccttccccgctctgaggagagtcgatactaacagctaccctctccctgccctgggagacctggggtgggcagggaacccctccctgagaacctcagacccactcttccattgcatcctgtaggacccagtggaacctgacagagcccataggattccctcttctactttcttagacagcagggatgtcagggtctcaaactgcctaacactttgtagcttttcttaacacaaaagcaccccttctctcctaacttgggctctgaatactttcccaacaggaagtctgatctgttgccagacttcttggttagatggctcatacatttatctagagaagcacactcttgcttgctgtcaaactttagamcaccatggaaggtctaagggcatcctgtgccagggaaactttttaaggaattttatctatgggataaaccccatattccctctagtgtctactggtggctctaatactgctttgtgctgcctgccacacttgccctttgagcctgcgaatggccgctagtgagcaagctctgcttcagagcagtctagttaggtagaacagggacttaccagcttcccaaagggatctactcaccattgccaaactcttcatttccacattttgtgtaggtgtcagggaaccccaaactggtgttgctttggggtctctaaaggagattggctgacaccaccatttcccccagatccagattctctgagggaggttgtttcttgagagtagatccagagtgtcaaggatctgttagatcctggaatcccttcttgcatccatccctccctggtagctaggtcccgatatactcctgtcttgtgagattgtcgagatgagatgggggaccactcttcctctgtccttcctctctcctttcctccatagcaaggacgaccttccctgctccatgcccagagtatagctagatcccttcccctccctaccctctgaatgtgtgctagatcaggtgccccactgtgtttcctgaaatccttgggagccggatctccccatctcccctactcactcttcccttttcttctctcagtgttgtctgaataaagtgtgaaatcttttgtgttttctaaattgacattttcaatgaaaaaaagaatcacaaaaaaaa

SEQ ID NO: 36 - DNA, 384 bp, Homo sapiens
  misc_feature (366): n equals a,t,g, or c
  misc_feature (370): n equals a,t,g, or c
ccagcaggagaatcctcccctgccccttggctcaaaggccctggagcccacctcccagaagcccggtgtgggggcgggccacgggggagatcccaagctcagtccccacaaagttcagggccggtcggaggcaggggcaggtccgggtccaaagcaaggacaccacagctcttccgactccagcagcagctccagcgattcggacacggatgtraagtcccacgctgctggctccaagcagcacgagagcatcccgggcaaggccaagaagcccaaagtgaagaagaaggagaagggcaagaaggagaagggcaagaagaaggaggctccccactgaagggcctggacaaggctcattaaacttcntctntgccaaaaaaaaaa

SEQ ID NO: 37 - DNA, 468 bp, Homo sapiens
gcgatgctgggtgtggcaggcctcctgagccggctggaggaggacaggctgctgctgctaccgaaggaggatgkctgtcgctgggccttggctgtaggcagctgggcttactgccgggccctgcatacacagcgcctccagtgggagtgacagttggatacagccaggcagggtttctgccctgccgaacactttccctcccacctgcctgctcctggcgccttctccctaggggtagactcttctgcctactgaagtgggtttgctgcacattgactggtcaggggcagagtctgggtgctgtcctttggccacgtgtggggacttgtctagaccagaatgaaaggacagggtcccagacacgtttgggggtcctgattctgggctggacacggttgtggatccagagaagaggcctagtctccaataaatcttaggaattttgcaggaaaaaaaaaaaaaaaaaaa

SEQ ID NO: 38 - DNA, 1095 bp, Homo sapiens
ggcacgaggataatgagcataagcgttcactgaccaagactccagccagaaagtctgcacatgtgaccgtgtctgggggcacccaaaaaggcgaggctgtgcttgggacacacaaattaaagaccatcacggggaattctgctgctgttattaccccattcaagttgacaactgaggcaacgcagactccagtctccaataagaaaccagtgtttgatcttaaagcaagtttgtctcgtcccctcaactatgaaccacacaaaggaaagctaaaaccatgggggcaatctaaagaaaataattatctaaatcaacatgtcaacagaattaacttctacaagaaaacttacaaacaaccccatctccagacaaaggaagagcaacggaagaaacgcgagcaagaacgaaaggagaagaaagcaaaggttttgggaatgcgaaggggcctcattttggctgaagattaataattttttaacatcttgtaaatattcctgtattctcaacttttttccttttgtaaattttttttttttgctgtcatccccactttagtcacgagatctttttctgctaactgttcatagtctgtgtagtgtccatgggttcttcatgtgctatgatctctgaaaagacgttatcaccttaaagctcaaattctttgggatggtttttacttaagtccattaacaattcaggtttctaacgagacccatcctaaaattctgtttctagatttttaatgtcaagttcccaagttccccctgctggttctaatattaacagaactgcagtcttctgctagccaatagcatttacctgatggcagctagttatgcaagcttcaggagaatttgaacaataacaagaatagggtaagctgggatagaaaggccacctcttcactctctatagaatatagtaacctttatgaaacggggccatatagtttggttatgacatcaatattttacctaggtgaaattgtttaggcttatgtaccttcgttcaaatatcctcatgtaattgccatctgtcactcactatattcacaaaaataaaactctacaactcatctaacatgcttacttaaaa

SEQ ID NO: 39 - DNA, 1757 bp, Homo sapiens
  misc_feature (596): n equals a,t,g, or c
  misc_feature (647): n equals a,t,g, or c
  misc_feature (648): n equals a,t,g, or c
gccagccaccattttatctctctaaagtctggtcccagtattaaacctattctttagtaaactcatattactgttctaaattgaagaaattatttattactctgtacttctagactcaaaattctttatcaaagatagtctcaaagaggtagtacaagtcctgtttaactgcactttttcacattcacagtgcttcctctgatatctttccttacatcattatacactgttgatatcattttactcttctttctcttctacatttcttaaattttggttcttttcctgtacatgtgttttagcggggcccttttctttgaactttgtctaattagcctgtacatttttgtttcttttaaggtagaacagatctttttttgtttctccttttaagtctactggttttaaaagaggtaaatgtatccatagaccacagtgccttgctttttcctctgccagcacatggagcacgggattagatgcacaaacctatttagggaactattttggtagatgtttgagtttatacagaaattgcagctggtattttattttgctgtacatttactcaacttgtccattagtatttaactatntccagagtttgtttaggagtaagaattgacccattcgttagtttaccatannttttcctggtataaaaaggagccagaaataagccttattgctaaataattaattatgtaagcccacctaggtcctgcataagatccccctcacatacttcacaatatatatgtgtgtgtgtgtgtgtgtgtgtgtgtgtgtgtgtgtgtgtgtgtgtatktggctaaaaaattatactgccaaaattactgattataaatacttgactacactgattgatgggacaaaatgattaaagtattttcagggatcttattccatatgtcaccaccaaagatttctacagtgttataaagtatataaatattccaaatttctgtggttaaatatttttttcttttttttccttttttagaataacacagtctgtgctttccaaaaatgcttgaacttttatgttgttaagaaatatataatgatatcttacattaagcatgagtctaatttgtattaattgggatggactaaattttcatttgattatcaggaaaattaaggagttatatatttaaaagcaattttctgtgttttcttctttgtaagttgactcatttgtgaagcaattaggcaaattttgagaagatcattgttattgtggtttgcagtatatatttcttagtaaatatcacttaagattaaatttttcagaaagaaaattatagcttttttcccaaaatatttttaagatttaatctttttgtagtatgctacagatttaattatattaactcttttttaagacattgaccatgacttaacattttgccttctaacaccttttaaatctatgtactttaatagttaagagaaaataagtttgcagatttttaataatctgtttgtaaaaggctatctctaagcctagtatgtgggtaattttacaggtgtgttttttgataactttaatataaaataaactcattttatttgtggcaattcgcgtttctttttttatgccagagtacatatgttggattccatgaattggtattacttattattatgtgttgattaaatatatgcacacacttaggattacagatcacagagcaaattatgaaaatcataaacattctggtatggtcatccataggattatgaaaaagaaa

SEQ ID NO: 40 - DNA, 1945 bp, Homo sapiens
accgggagctggtgacggatggcggggccgccagcccctggcgctgcaactgggaacagttgttgaacccgcgaccaagcgaggcggaccctgaagcggaccccgaggaagccactgctgccagggtgattgacaggtttgatgaaggggaagatggggaaggtgatttcctagtagtgggtagcattagaaaactggcatcagcctccctcttggacacggacaaaaggtattgcggcaaaaccacctctagaaaagcatggaatgaagaccattgggagcagactctgccaggwtcgtctgatgaggaaatatctgatgaggaagggtctggagatgaagattcagagggactgggtctggaggaatatgatgaggacgacctgggtgctgctgaggaacaggagtgtggtgatcacagggagagcaagaagagcagaagccactctgcaaaaacaccgggcttcagtgtccagagtatcagtgactttgagaaatttaccaagggaatggatgaccttgggagcagtgaggaggaggaagacgaagagagtggcatggaagaaggggatgacgcggaagactcccaaggcgagagtgaggaagacagggctggagatagaaacagtgaggatgatggtgtggtgatgaccttctctagtgtcaaagtttctgaggaagtggagaaaggaagagccgtgaagaaccagatagcactgtgggaccagctcttggaaggaaggatcaaactacaaaaagctctgttgaccaccaaccagcttcctcaaccagatgttttcccattgttcaaggacaaaggtggcccagaattttccagtgccctgaaaaatagtcacaaggcacttaaagcattgttgaggtcattggtaggtcttcaggaagagttgcttttccagtacccagacactagatatctagtagatgggacaaagcccaatgcgggaagtgaggagatttctagtgaagatgatgagctggtagaagagaagaagcagcaacgargaagggtccctgcaaagaggaagctggagatggaggactatcccagcttcatggcaaagcgctttgccgactttacagtctacaggaaccgcacacttcagaaatggcacgataagaccaaactggcttctggaaaactggggaagggttttggtgcctttgaacgctcaatcttgactcagatcgaccatattctgatggacaaagagagattacttcgaaggacacagaccaagcgctcygtctatcgagttcttggcaaacctgagccagcagctcagcctgtcccagagagtttgccaggggaaccggagatccttcctcaagcccctgctaatgctcatctgaaggacttggatgaagaaatctttgatgatgatgacttttaccaccagctccttcgagaactcatagaacggaagaccagctccttggatcccaacgatcaggtggccatgggaaggcagtggcttgcaatccagaagttacgaagcaaaatccacaaaaaagtagataggaaagccagcaaaggcaggaaacttcggtttcatgtccttagcaagctactgagtttcatggcacctattgaccatactacaatgaatgatgatgccaggacagaactgtaccgctctctttttggccagctccaccctcccgacgaaggccacggggattgacatcgcccacctccgacacccagtgggcgccttggctggtgcggctgctggtccagatggaggaaaccagtgactttatggggctgagctagtagggaagcccctggaaagatgctgcgttccgaacctgtgcctaatacacgcaagggcgctgtcccgcccaaccccgcctttaaacgccacaaataaagagcattgttaccgccaagtacgacgcggccgcgaattaccggaccggtaac

SEQ ID NO: 41 - DNA, 588 bp, Homo sapiens
aggcgtataccaccatgactgaaaacaaaagacttttttttgagactccctctcaaaaacaaaacaaaacaaaaaaattagacaaatgctacattaatgtttgggtggtcagattctactttgaatctgaagtttgcagatatgcctatagatttttggagtttaccactttcttattctgtatcattaatgtaatattttaaattactatatatgttaccatttttctggatttagtaagaaatttgcagttttggtttgatgtaacaagggttttaatgtaatttatgttagattttgcatttttttcattactgttatattttaacctgactgactgatctaattgtattagtattgtgaataatcatgtgaaatgttttgagacagagtactatatttgtgaatataattttatggtttttttcacttagaacctttctgtgtggaaaactaagaaaattgctttctgctgtataatctggcattcattgtagattaaagcttatttttctgtgaataaaacgtattcaataaaatactattctttaaaattawawmawaaaaaaaaaaaaaaaaaaaaaaaaa

SEQ ID NO: 42 - DNA, 1568 bp, Homo sapiens
  misc_feature (104): n equals a,t,g, or c
  misc_feature (112): n equals a,t,g, or c
cattagatttcacttttttaaaaaacccagtggacattgctataaataagatttatttggctacaaataacctgggatgttgcttattatgattgatgcctgcnggtttgtncccaagctgagtgaaattgaacctcgtcctccctactcattttgatgactgaggctggtttataagaaaaggaagtttggagaagaaaaccgagattagaaaatatcatgttttggttggagataagaaccagggatggcaagtaccagtgtgtacaaatgtatttcacggagtttgaaggaacgcataatcaagagggaaaacaatttgtccttcattggacgtattatttggatttgggtgagcaacaaaatggaatgtggtctgttaggagcattctgtttgttcttttgtccctgatgtgatgaatcattgccacatgctagatggactcttcatatccaggttttgtccctcagggctgagcactgtattaaagagtttttgttgagtcatttaaccttagtgtccacatccagatcagctgtaaaatggggaagacgtgtgctgatttggaatgaatgcaaaatatcactatcattttcctaattacagaggagcaaaggttatcttcagccctttcagttctatgctcacatattcaaatatcaaatgtaatttagctgaagttatttaataatcaagtctttcaatatctgttcaaagaaaaagaacacactttgaaaattctgcaaagctgtctcccagtctttaaaatgtctggaagcactctccttctttacaataccaacatcactggcccagaatcttccctgtgctaggttgtaaatataaataaattacttgttttgtaaacttttgtaaagaatattttggtagaaatacttcaaacatattctttgggttatatttatacatatgtgaaataaatatactatcaaaaggttatattttatacaaaaagtaaattgctaccttttgtatgctaatatgcaaagttttgtataatatgatggtttatttttagctctacacttaaaccataggtggttgagtgggaacttttgaaaactatcaagaggcttgttagacaaatttatattctgaaacctcaataagaaagcattccaggtttcaatccttgttttttgtcctgctcccaaattcttttttaaacccatagttcttgtgtcttatttgattcttctgctgtgcacattgtattggtccttgttgcatgtagtctactgtgtgttttccgattttataaggcagcatttctccatacaaaaaraaaaaaaatgatgtacatataaacgcttttrttgtatggctcctccatgttactgtatatatctgccagcacttcccagttacactcctgtgagtcagcttatttttaccctaacataaatagtatgttttgtagtagttatcaaatttaagagataaagcaatcagaatgtttggattttcttctatcttaatgtgaatttcataattaatgtctatttattcagctattcattaaaatacaggattctttggggaaaaa

SEQ ID NO: 43 - DNA, 1060 bp, Homo sapiens
gcttgtcatgagaaggtggtaaatatccaaaaagaccccggtgaatctctcggcatgaccgtcgcagggggagcatcacatagaraatgggatttgcctatctatgtcatcagtgttgagcccggaggagtcataagcagagatggaagaataaaaacaggtgacattttgttgaatgtggatggggtcgaactgacagaggtcagccggagtgaggcagtggcattattgaaaagaacatcatcctcgatagtactcaaagctttggaagtcaaagagtatgagccccaggaagmctgcagcagcccagcagccctggactccaaccacaacatggccccacccagtgactggtccccatcctgggtcatgtggctggaattaccacggtgcttgtataactgtaaagatattgtattacgaagaaacacagctggaagtctgggcttctgcattgtaggaggttatgaagaatacaatggaaacaaaccttttttcatcaaatccattgttgaaggaacaccagcatacaatgatggaagaattagatgtggtgatattcttcttgctgtcaatggtagaagtacatcaggaatgatacatgcttgcttggcaagactgctgaaagaacttaaaggaagaattactctaactattgtttcttggcctggcacttttttatagaatcaatgatgggtcagaggaaaacagaaaaatcacaaataggctaagaagttgaaacactatatttatcttgtcagtttttatatttaaagaaagaatacattgtaaaaatgtcaggaaaagtatgatcatctaatgaaagccagttacacctcagaaaatatgattccaaaaaaattaaaactactagttttttttcagtgtggaggatttctcattactctacaacattgtttatattttttctattcaataaaaagccctaaaacaacaaaaaaaaaaaaaaaaaaaaaaaaaaaaaaaaaaaaaaaaaaaagggcggccgctctagaggatccaagcttacgtacgcgtgcatgcgacgtcatagctcttc

SEQ ID NO: 44 - DNA, 1344 bp, Homo sapiens
  misc_feature (144): n equals a,t,g, or c
  misc_feature (163): n equals a,t,g, or c
cccacgcgtccggggccaccagggcctcctggcccccctgggcccccagcccctgttgggccaccccatgcccggatctcccagcatggagacccattgctgtccaacaccttcactgagaccaacaaccactggccccagggnacccactgggcctccaggncytccagggcccatgggtccccctgggcctcctggccccacaggtgtccctgggagtcctggtcacataggacccccaggccccactggacccaaaggaatctctggccacccaggagagaagggcgagagaggactgcgtggggagcctggcccccaaggctctgctggggcagcggggggaactggccctaagggagaccctggtgagaagagccactgggctcctagcttacagagcttcctgcagcagcaggctcagctggagctcctggccagamgggtcamcctcctggaagccatcatctggccagaaccagagctggggtctggggcgggccctgccggcacaggcacccccagcctccttcggggcaagaggggcggacatgcaaccaactaccggatcgtggcccccaggagccgggacgagagaggctgagggtggtggcggcccctgaggcagaccaggccaggcttcccctcctacctggactcggccagctgcctccagggaccgcccgtccatatttattaatgtcctcagggtcccttctgccatctaggccttaggggtaagcaggtctcagtcctggcaccatgcacatgtctgaggctgagcaagggctgagaggagaggcttgggcctcagtttccctctgtgaagtggggggaggcaggccttcaaggagggatagaggtacaaggcttcgtctcatctgctgtctgagcatccaggcccaaaggcactgagggagtcaggagctggggctcggcacatgcagagatgacagggcagggggcagtcttcctccccctccccgaccaaacctcggggagccctcctgtgcccctccctccttgttgtccagtgctgggytccccaccccgaggtcaggctgcccaatcctctgactggatcaccgggggcttcttgcctcagttcttccctctgagcccccaggccctcccgcatctcaggttggggatggggacatggagaggaaggggccgcctactcctgcaaatgcttgtgacagatgccaggaggtagatgtgtgctggccaataaaggcccctacctgattccccgcaaaaaaaaaaaaaaaaaaaaaaaaaaaaaaaagggcggccgctctagaggatccaagcttacgtacgcgtgcaacgcgggtcatagct

SEQ ID NO: 45 - DNA, 892 bp, Homo sapiens
  misc_feature (890): n equals a,t,g, or c
ttgagaagttggatgaatatatatatagacacttctttggtcacactttttcccctccatatggacccagtcgacctgataaaaagcaacgtatggtaaatattgaaaactccaggcatcgaaaacaagagcagaagcaccttcagccacagccttataaaagggaaggtaaatggcataaatatggtcgcactaatggaagacaaatggcaaatcttgaaatagaattggggcaattaccttttgatcctcaatactgattcacaattgagttaaattagacaactgtaagagaaaaatttatgctttgtataatgtttggtattgaaactaatgaaattaccaagatgacaatgtcttttcttttgtttctaagtatcagtttgataactttatattattcctcagaagcattagttaaaagtctactaacctgcattttcctgtagtttagcttcgttgaattttttttgacactggaaatgttcaactgtagttttattaaggaagccaggcatgcaacagattttgtgcatgaaatgagacttcctttcagtgtaagagcttaaagcaagctcagtcatacatgacaaagtgtaattaacactgatgtttgtgttaaatttgcagcagagcttgagaaaagtacattgttctggaatttcatcattaacattttataatcttacactcacttcttgtctttttgtgggttcaagagccctctgacttgtgaagaatttgctgccctcttaagagcttgctgacttgttttcttgtgaaattttttgcacatctgaatatcgtggaagaaacaataaaactacaccatgaggaaaaaaaaaaaaaaaaaaaaaaaaaaaaaaaaaaaaaaccccggggggggcccnga

SEQ ID NO: 46 - DNA, 496 bp, Homo sapiens
  misc_feature (496): n equals a,t,g, or c
aattcggcagagtcggagtgtggtacttctcctagttgcagtcaggcttcatacgctattgtcctgcccgtaagttcccgttttgtgtgtggttagagcagccagcgggtacagaatggattttggaagagggagtcaccactggacctccaaggaagccacgtgcagacatctacaaccttcgatctcctgacgagtttattgttggccaaaaccaggctttgattgaaccaggatgaatgcgggtgttggaagtagaatatatatatacatataaaattgaaactggcgatggaatatgagaggagccctctggaaagaaaaggacagaccctgtgctttcatgaaagtgaagatctggctgaaccagttccacaaggttactgtatacatagcctgagtttaaaaggctgtgcccacttcaagaatgtcattgktagactttgaaatttctaactgcctacctgcataaagaaaataaaatcttttaaatcan

SEQ ID NO: 47 - DNA, 1229 bp, Homo sapiens
  misc_feature (764): n equals a,t,g, or c
  misc_feature (1165): n equals a,t,g, or c
attcggaacgagagctgatatggaagggttatttctttctggccaatactttttggtatttctaaatattgcaatcttgatttttactattaaatttgttaattgtcagttctggcttttttgcataaagagttggtccattaacttgccaatttgaagcttctaactagatattccctactgaaagttttggatttgtttttagtttgtggagcagtcttagctggggacaggtaattgacaacggcagagatactttcttttcctaggattctaagtctgtaatccacatcctcaatgtattcacaggactttaaaattctctccaaatgaggragggaaatatcctggtgctttctaatgggttactaaaagttgtgtttagaacaacagattttaataggcatcttcctttgttatgtgtcattagccctttgcccgtttaccttagggctctttgaaggagaaatggatgggagaaaacctgtcacttggcgaaagtaaaagggataattaactggctcagagcttatgtgcagagttccaagccccaaagttaatctagaaccactcgataacaccaataaaaatatttatttcacatctgttatatatctggaaaatgktctaagcatcttacacatatttctcattaaatccacaggtgaccattgtgaggtagawattttgktctaawtttccagatgaggaagctgagaccctaaaaggttaggtgacaggttatacaacttggagtgtgggangaggagagaggaacctgaacagggcaagttggggatctgacttttgtttgggtagatgtaagcacattgtatttttggcttagatgctttattcatcatggctgaaggtaataccatttactcactcaccgaaaattgtttacaataatctagatgaatttgctgtctttggacatctgtcttttgactggaccccagtatatagtctgtggaagctcacttaaggagaragctcctttttgtttggttagagaaattttctgtcctaaaagtagaaatagccccttctaggtaaggatggagcatttgatcatactggtttcattatattcctctaacaggttggaaccgattgtttttgagtacttgtttcaaacttctgagtattttccttctggaanatagctcagtgttttaaaatttacatgaacttaaaaggttaatttttttttaaaagaatggtta

SEQ ID NO: 48 - DNA, 1411 bp, Homo sapiens
  misc_feature (1410): n equals a,t,g, or c
  misc_feature (1411): n equals a,t,g, or c
catcctggctccttgagtgggagtratatcacctctatcctaactgtccttgtccctcctctccccacagctggattatcaccgaggcctcttggtggaccgtccctctgaaactaagacagaggagcagggaataccacggcccctgcaccccccacccccacccccggtccagccaccacagcacccccgggcagagcagcgggagcaggaacgggcagtgcgggaacagtgggcagaacgggaacgggaaatggagcggcgggagcggactcgatcagagcgtgaatgggatcgggacaaagttcgagaagggccccgttcccgatcaaggtcccgtgaccgccgccgcaaggaacgtgcgaagtctaaagaaaagaagagtgagaagaaagagaaagcccaggaggaaccacctgccaagctgctggatgaccttttccgaaagaccaaggcagctccctgcatctattggctcccactgactgacagccagatcgttcagaaagaggcagagcgggccgaacgggccaaggagcgggagaagcggcgaaaggagcaagaagaagaagagcaaaaggagcgggagaaggaagccgagcgggaacggaaccgacagctggagcgagagaaacgtcgggagcacagtcgggagagggacagggagagagagagagaaagggagcgggacaggggggaccgagatcgggatagggaaagggaccgagaacgaggcagggaaagggatcgcagggacaccaagcgccacagcagaagccggagtcggagcacacctgtgcgggaccggggtgggcgccgctagctgggaaaacactagagctgcaggtaccagccactcggccccagggggttatggccacagagggataggcacagtctccaccaccctggagccaagggtctttcacatcacctatccctacatacataccaaatggaaaagtggccatccttttccccccaaacacacccccttaacctatctcttgggacttagcccgaccctccctctcatttcccattaagtctgagaggcaagagctaggttaggcaaggaggtggttggccagagatggggaacagccaggtgccccagtcctctgatttttcctccatcctgcttaccacctccctgggtacttacagccttctcttgggaacagccggggccaggactgggtcacctatgagctgaatcagcatctcctcctgagtcccagggcccctgcagttcccagtctcttctgtcctgcagcccttgcctctttcccacaggttccactttatatccaccttttccttttgttcaatttttatttttattttttttattattaaatgatgtggtctatggaaaaaaaaataaaaatctgacttagttttaaaaann

SEQ ID NO: 49 - DNA, 1685 bp, Homo sapiens
  misc_feature (5): n equals a,t,g, or c
  misc_feature (344): n equals a,t,g, or c
  misc_feature (1606): n equals a,t,g, or c
cgctnttcccccccacacccgtgtggccagggatccccgcatggcccatcttagaaactcaactatttggtggatgctaaacacttcacttcaggcaatcccaaggcatttgctccagggtatccgatgagattacagctgttaagcttgctttccatttcataacttgctgtgcagctagttaccacccccatgctgaagagtaaagcaaagtgccgtggttcggcagtggaatccacccccagcactctgctcgcactggagcgttcaagtccggttatgtgagaacagactaggactctcttgctgcctctaattgcatttcactgtcaccctccccagtnttctgatggtgtgcatgtgaggagaagatgaggttaggactgagaagtgcagaagttggaacagtggtaaggctgttttaaaataagatgttttgttttaataatatgctcctggcacaaagctaggagtaaatgtgactccaaagggagttcagttaatctctgaaatgcacaaaacctagctattttctccctctcatcacagtctgagtctggtccattgctaccccaattctctggggacataaaaccaggctggaaagggaccaggaagtttgaaatagtgacatatcatccactagtcccaagggctaaggaatagtgagtttattctggaaggaactgggaagcttagtctaattagtgcctggggatgacctatgcaatcacaccgcttatgaccatcctagagagggccctgagcaccagcttgatcttagggatttccaaagtaacctgctttttgcctggatagggttaaaatagacctttcttgcctatccttgccttaacctatctgcctgaggttggcctgagattgtgagtcaacgactttgctatcttttcctcagtgttgaactttcattaagaaataaagtcctagcttcttacagagaggggtccaaatggtgaatgctcatcctgcctgggattcaaggaattagctcagagrttggcccctagcttttctgcctttgtaggggacagcaaaaggggaaaatttgctgcagaaaattccaaaagattgctgtagctctcacagggaagtggtaaagatcagctaaacctgggttggggtgctttctgcccagtgggtcttggcataagtagattaatcctgctcttttaagaaaaggcaacttattcaggcagtctggaaagggggttctcagaaaactcagtttctttattccttcttttctcccaactactgttactggttatagaggtctttggactctaaagaccaatgtttggccactaactggactaatatgtatctttctgtgatttcatcatagaggtctgttttgtgagggtttggggtgcagaaaactttgattaaatcttaatgggaggctgggtgacctggattatctacagtgagcagacttaaatggaacagaagtttatgtgtccaaatgatggaatcattaaacctgagtgacttgacctgtgtggttccttaatagtatctatatatctagacaaaaatagattgtgaatgtaaatggtgaatgaaaaggatggaaataatgttntcatatgttaatccatgagcttgaatccagggaggaatacctcggtgctttaaccaccttagttataacacatttctta

SEQ ID NO: 50 - DNA, 660 bp, Homo sapiens
  misc_feature (515): n equals a,t,g, or c
cggcacgcgtgggcctactttcacgcttcctcccctccccctcctcccttatcccttcgctttcgctcttttccgtcgaggccgacccctgagttgtgagtctggggtctggttggtgaaaaagagcccttgaagctggaagacgggagaggacaaaagcatgtcttcccttcctgggtgcattggtttggatgcagcaacagctacagtggagtctgaagagattgcagagctgcaacaggcagtggttgaggaactgggtatctctatggaggaacttcggcatttcatcgatgaggaactggagaagatggattgtgtacagcaacgcaagaagcagctagcagagttagagacatgggtaatacagaaagaatctgaggtggctcacgttgaccaactctttgatgatgcatccagggcagtgactaattgtgagtctttggtgaaggacttctactccaagctgggactacaataccgggacagtagctctgaggacgaatcttcccggnctacagaaataattgrgattcctgatgaagatgatgatgtcctcagtattgattcaggtgatgctgggagcagaactccaaaagaccagaagctccgtgaagctatggctgccttaagaaagtcagctcaagatgttcagaagtt

SEQ ID NO: 51 - DNA, 1572 bp, Homo sapiens
  misc_feature (2): n equals a,t,g, or c
  misc_feature (1555): n equals a,t,g, or c
tnagtgaaagaatgtgccatattacatattgcaacctaatttgttaaaactaactccagcactaaagctgaaatgccacaaacactaaaagtataaatatgtctgatttttgaaacacataagctttgctctttaggcaggaatgatcttttcaaatcattagcacaatatttaaatatctaaaaatttaagagatccatactttctgtagctttacaattaatttaagtactaaaaagacaaggatttcttttaagaaatttatagcatttactgtgttatttaaatgctaagccaaagtatctgcacttaggtatacctctttatgccaataatgattttaatgaaggctcttttcagatgtaaccttatgaaggaaatatctgctttgtgtatatgccagttagaatactggtttctaaagtctgtcaaattgtatttcagtggcacaaaaaccagttttgaggtcttagacttataattctttgaataaaactgataacttatttgtataattggagtggagacctacctccataattagataaactctttttggattataatcagaattttgccttttttcttctcaaattattacatatgtatgtattatatatccacatatatagttttccctgattaaatggatattaaaataattgcgggtgcttcaggactttttgcttctatatttaagtatattgtttttatagcaagaacatattctgaatgttttataaatctttaataatttatatgtaggtaatatttttgtatcacaatgcattatttttttcctcctttccttccaaactataccactgtatttaccacttctaagagtgactgacgacgggccagatgacccttgaagtagtcattatgtagcaataaatgaagcctgaaacaggtttttttacttccactttaatccttagaaatttcttggcaacttcgcatattttcattgacaccggtgtataagtataaatttaaatgaactaattacttttgcatattttaaattctttatatggtagttattttttataacaggatattaacataagttaaatcctatgtatttgaaattgttacagagctttcctctttacttcaaacagcaaaaaagtggggggcatattgtagtcctgtcatttaagttatgtwaaaaatttaatcattattttgatgctttaaacattctcatgtgtaatatatgtttttgtatcaaaaacactcatatatttcaagaaaaagaaattatgttaaatagccctgttttaagaaaaatatttatgaagcatctcaacttgaagatcaagtcaaagttataactcaggatctgargtctcaagctaggagagactgagaattttaatcagtttgggcatatartttggactgaatcacatctgtagtacttagccaaagacaatttggargaraatatcagccttctggaartagctacttcctgaacaatgtaaagtgtcgcaratattcaataaaatggcaacctgttaaaaaaaaaaaaaaaaaaaaaaacccnaaggggggggggccccg

SEQ ID NO: 52 - DNA, 635 bp, Homo sapiens
  misc_feature (632): n equals a,t,g, or c
gctgctccagctgttcgaaggtgatccagacgcaagatggctgtcctctctaaggaatatggttttgtgcttctaactggtgctgccagctttataatggtggcccacctagccatcaatgtttccaaggcccgcaagaagtacaaagtggagtatcctatcatgtacagcacggaccctgaaaatgggcacatcttcaactgcattcagcgagcccaccagaacacgttggaagtgtatcctcccttcttattttttctagctgttggaggtgtttaccacccgcgtatagcttctggcctgggcttggcctggattgttggacgagttctttatgcttatggctattacacgggagaacccagcaagcgtagtcgaggagccctggggtccatcgccctcctgggcttggtgggcacaactgtgtgctctgctttccagcatcttggttgggttaaaagtggcttgggcagtggacccaaatgctgccattaaagaattataggggtttaaaaactctcattcattttaaatgacttacctttatttccakttacattttttttctaaatataataaaaacttacctggcatcagcctcatacctaaaaaaaaaaaaaaaaaaaaaactnggg

SEQ ID NO: 53 - DNA, 1367 bp, Homo sapiens
  misc_feature (106): n equals a,t,g, or c
  misc_feature (958): n equals a,t,g, or c
ggccacgttgttatctctttgatcaagttgttttacgtgtcacagtagagtctgaccagttaccataaccaaacattttgtgcgtgtgctattgttgctgcgatantctcctttgggtggaacacagtgaagatcgacatgagtgcagcccggagagatcctcttccaattgttccatttggattagctgcatttgctaccactttgtttgccttgggattagctttaggaacaaccatagctgttgggatgttgttttttatccagatgaaaataattctcagaaacaaaacttctattgagtcatggattgaagagaaggctaaagatcgaattcagtattatcaactagatgaagtctttgtttttccatatgatatgggaagtagatggaggaactttaaacaggtatttacgtggtcaggggtccctgaaggagatggacttgagtggccagtaagagaaggctgtcaccaatacagcttaacaatagaacagttgaaacaaaaagcagataagagagtcagaagtgttcgctataaagtaatagaagattatagtggtgcctgctgccctctgaataaaggaatcaaaaccttcttcacaagtccctgcaccgaagagcctcgaatacagctgcaaaaaggggaattcattttagccacaagaggtttacgatactggttatatggagacaaaattcttgatgattcctttatagaaggtgtttcaagaataaggggttggttccctagaaaatgtgtggaaaagtgtccctgtgatgctgaaacagatcaagccccagagggggagaagaaaaatagatagctgctgttaaaacaaaattatcctttaagtctgcttaattacttgaaaattgtacatattactaaagaattatgcaatgagcctactctggttaagatgttcttttcctcaaaggtgccctagtgccatngatttaaatatttttattaccattttgaaatggagaagccattctgcatatgcctttgaattcctgcccctctttaccacctcttcctccccctcaaaggaaaaacatttcatccaagtaagttaacggcattttctgtaggattttccttatgcactgcacactctggacctcacctgcagatacagttccccccttgccaggagcatctgcatgtggtacttctcttttccctcagttgatatttcttatatgatattctagatactatagaactcaatttgtcagattcagtataacctcagattttgttacctgtcttttaaaaatgcagattttgtcaaatcaaataaagatcaatggatgttgggtataawmaaaaaaaaaaaaaaaaaaaaaaaaaaaaaaa

SEQ ID NO: 54 - DNA, 378 bp, Homo sapiens
  misc_feature (14): n equals a,t,g, or c
  misc_feature (29): n equals a,t,g, or c
  misc_feature (363): n equals a,t,g, or c
ggcagtggtagggngtgagaaccctgggncctgctgaaaagcctcctctgtaggaggtcacccagcaggacaragaagcaggaggaggacagggccacaraggaagccaagaacggtgaaaaggccaggcggwgttcaraggaggtggacggccagcacccggcccaagaggaggtcccggaatcgccccagacctctggcccagagcagaaaataggtgtgggagccccagggaggaaaagccarytggagaggaagcagagwtggaaaaggctacagaggtgaagggggagagggtgcaaaatgaagaggtgggacctgaacatgacagccaagaaacaaagaagcttgaggagggagctncagtgaaggcgaccc

SEQ ID NO: 55 - DNA, 1058 bp, Homo sapiens
tcgggtatgaggctgggactaagccaagggattcaggtgtggtgccggtgggaactgaggaagcgcccaagcttttttgttctgaactcccactgcgttgtggattcctgaggatgggatgactgtatcttgattacccggagttttcaagatggcagcatctatgcatggtcmgcccagtccttctctagaagatgcaaaactcagaagaccaatggtcatagaaatcatagaaaaaaattttgactatcttagaaaagaaatgacacaaaatatatatcaaatggcgacatttggaacaacagctggtttctctggaatattctcaaacttcctgttcagacgctgcttcaaggttaaacatgatgctttgaagacatatgcatcattggctacacttccatttttgtctactgttgttactgacaagctttttgtaattgatgctttgtattcagataatataagcaaggaaaactgtgttttcagaagctcactgattggcatagtttgtggtgttttctatcccagttctttggcttttactaaaaatggacgcctggcaaccaagtatcataccgttccactgccaccaaaaggaagggttttaatccattggatgacgctttgtcaaacacaaatgaaattaatggcgattcctctagtctttcagattatgtttggaatattaaatggtctataccattatgcagtatttgaagagacacttgagaaaactatacatgaagagtaaccaaaaaaatgaatggttgctaacttagcaaaatgaagtttctataaagaggactcaggcattgctgaaagagttaaaagtaactgtgaacaaataatttgttctgtgccttttgcctggtatatagcaaatactcaaaaagtattcaataattcaatcaataaatataagtttcatcttacacgtaagatacaggtcttatctcctgatggtgtgtccattttgcctggtatataacagataataaatatccagtgtcaataaatgtaacaataaaagtttcatctttcctctttgtatgtgg

SEQ ID NO: 56 - DNA, 682 bp, Homo sapiens
  misc_feature (4): n equals a,t,g, or c
  misc_feature (667): n equals a,t,g, or c
gggnccggaacatattcccttactcaaaagattgcatgactgaatttgcttaaggaaaaaaaaaattgtatcaagtccattaatacaattatacattaattatattacattaatacaatatatggtttgtgaattcagagacattaccagtttgcctccttctctcaatagaacttgtattttcattttcttggttaagcagttgtctcctaatattatcccatatgctacctagtttgctggtcccaagcagtttactgtacttcactagatttggtacctgctctcccctggacttctttttcaatattctagcctttcctagatgtaaatctttacctccttgttagtgaaattagatataagccatgatttggagagggaagaaatctggaatacttaatttcatttaattatctatgctgatgaatgcctgtatcattgttaataaaggagaattgaaaatactcatttctactttctgccctcaaatttctgtttctatctcaactaggcaagaatcagcagggtgcatgaygccattttaagctgcttcacatcagactgaaatcctaattacagttcataagtgaaacagactaattcmatgggcaatacctttkgtawaggtccygtgcttaaaggaggcaagtataaattttcccantaaggaatccccggt

SEQ ID NO: 57 - DNA, 644 bp, Homo sapiens
  misc_feature (5): n equals a,t,g, or c
  misc_feature (27): n equals a,t,g, or c
  misc_feature (458): n equals a,t,g, or c
  misc_feature (619): n equals a,t,g, or c
ggagnctgggcctgtgcggcggccgcngtagcgctttggaaggcgcacggggcgaagatggcggcggacgacaggaggcgctgagggagttcgtggcggtgacgggcgccgaggaggaccgggcccgcttctttctcgagtcggccggctgggacttgcagatcgcgctagagctttttatgaggacggaggggatgaagacattgtgaccatttcgcaggcaacccccagttcagtgtccagaggcacagcccccagtgataatagagtgacatccttcagagacctcattcatgaccaagatgaagatgaggaggaagaggaaggccagaggtgagtcttctagagggggtcagggggacagttcacagggaagtccagggtaatgtgtaaatcacctagaacaggacctggtaaaacatgtttggtttattgttagccattactactgtgggctngtctgtgtgggttatatcttaggaagtctcttctactccttgtagcttagaagtgacccctgttccgttacttaatgtatttattgaggaatattaggggagggaaaccaaggaaaagatctagcattcccactttttggtattgactaaaaaggatttgnaaatcagtttgtaaaagaaggtgtc

SEQ ID NO: 58 - DNA, 766 bp, Homo sapiens
  misc_feature (760): n equals a,t,g, or c
gggtcgacccacgcgtccggaatgttttggtgaataaatctgttcttcagcaaccctacctgcttctccaaactgcctaaagagatccagtactgatgacgctgttcttccatctttactccctggaaactaaccacgttgtcttctttccttcaccaccacccaggagctcagagatctaagctgctttccatcttttctcccagccccaggacactgactctgtacaggatggggccgtcctcttgcctccttctcatcctaatcccccttctccagctgatcaaccyggggagtactcagtgttccttagactccgttatggataagaagatcaaggatgttctcaacagtctagagtacagtccctctcctataagcaagaagctctcgtgtgctagtgtcaaaagccaaggcagaccgtcctcctgccctgctgggatggctgtcactggctgtgcttgtggctatggctgtggttcgtgggatgttcagctggaaaccacctgccactgccagtgcagtgtggtggactggaccactgcccgctgctgccacctgacctgacagggaggaggctgagaactcagttttgtgaccatgacagtaatgaaaccagggtcccaaccaagaaatctaactcaaacgtcccacttcatttgttccattcctgattctwgggtaataaagacaaactttgtacctcaaaaaaaaaaaaaaaaaactcgagggggggcccggaamcaattcgggctatagnagagcg

SEQ ID NO: 59 - DNA, 2361 bp, Homo sapiens
  misc_feature (1174): n equals a,t,g, or c
gttctagatcgcgagcggccgccctttttttttttttttttttggaaagcaaggatcacacttccccctccctgttccttaatcccttttctaaaaaggggggaaaatccggatggattttagggattggtctggtgtcagctgtgttttattgcacacctaaatcctgattataggcttttcatttctccgcaaagcctttattttggcagttaagccaaatgtgttttccagaaagttagttattttctcctctttctttcctttctttcctccctttttcccgtctgaccccaaacgttattgtccaaacatgactggacagcagcttttgtttcttgaccctgtaatatgacagtctgctaatattgacagaaggtgcagtttttgggttatagtcgtgattttcgctaatcaatcatattagcaggaaaaaaaatgacttgtttctgttgtacttgagtcttaagaaaaagtgcccatagtttagtgacaatttccaaaggctttagtaccacctgtatttcaaaatgggggacccaaactcccggaagaaacaagctctgaacagactacgtgctcagcttagaaagaaaaaagaatctctagctgaccagtttgacttcaagatgtatattgcctttgtattcaaggagaagaagaaaaagtcagcactttttgaagtgtctgaggttataccagtcatgacaaataattatgaagaaaatatcctgaaaggtgtgcgagattccagctattccttggaaagttccctagagcttttacagaaggatgtggtacagctccatgctcctcgatatcagtctatgagaagggatgtaattggctgtactcaggagatggatttcattctttggcctcggaatgatattgaaaaaatcgtctgtctcctgttttctaggtggaaagaatctgatgagccttttaggcctgttcaggccaaatttgagtttcatcatggtgactatgaaaaacagtttctgcatgtactgagccgcaaggacaagactggaatcgttgtcaacaatcctaaccagtcagtgtttctcttcattgacagacagcacttgcagactccaaaaaacaaagctacaatcttcaagttatgcagcatctgcctctacctgccacaggaacagctcacccactgggncagttggcaccatagaggatcacctccgtccttatatgccagagtagagtactgaccagcaaaatggagaagatcagagaatgcagcagcagttttttttcttgttttcttaccactttattctttcagagtttaaagaaaatggactcatgcacagaacactatgcattttgaaacttgttcatcctggatttttttaaatcatttttatctcagaacttaaacaaaaattagatgtcgtgcacggactgtgtgaaagaagatgctttgcatatttgctgcactgcatcagtatcttactaaaaatgtgaaatgaaaggactattgtacactgaaatgcttaaatgtatctgaaagcacaaggtgatactcatttttatggtcttcccatttgtgctggtttttgcctctttgacatctgtcatcagtatttagagggtgagaagtgaatgtaacaggtataaataacatttttaaaaacaataactttgctataatcacagttgttccagagcactgtcagatacattctaatgaccagaactggtttaaaaaaagaaaatacaaccatgggaargaaatcttaaatgaaaaacgcatctcattgtaggcatttttgcctcatattttactgggccatgtttgtttcctggtactcatgtattttttttttccagatctctttccccaagttgctattgtaagagtattctgctgcgtgtggatgcagttatacacattaaagcagatctggagtctgaagtagctataaagcagctataaaacagaaatacatgcatagctgcagaaaccatgataggtagaggacttttcttttggttttgttttgttttgttttgttttgtttttggttttacagagaagagatttttattacaaagaaaaaaattccagtgaattgtgcagaaatgctggtttttacaccatcctaaagaaaaactttacaagggtgttttggagtagaaaaaaggttataaagttggaatcttaaattgtaaaattaaccattgagtgtcaaagttctaaaagcagaactcattttgtgcaatgracataaggraagactactgtataggtttttkttttctccttttaaatgaaraaaarcttgcttaagggttgcatacttttattggagtaaatctgaatgatcctactcccttgga

SEQ ID NO: 60 - DNA, 1472 bp, Homo sapiens
  misc_feature (129): n equals a,t,g, or c
  misc_feature (130): n equals a,t,g, or c
aattcggcacgagcccagatggcgctggaggaccaggccgccacactggagtataagaccatcaaggaacatctcagcagcaagagtcccaaccatggggtgaaccttgtggagaacctggacagcctnncccccaaagttccacagcgggaggcctccctgggtcccccgggagcctccctgtctcagaccggtctaagcaagcggctggaaatgcaccactcctcttcctacggggttgactataagaggagctaccccacgaactcgctcacgagaagccaccaggcaccactctcaaaagaaacaacactaactcctccaattcctctcacctctccagaaaccagagctttggcaggggagacaacccgccgcccgccccgcagagggtggactccatccaggtgcacagctcccagccatctggccaggccgtgactgtctcgaggcagcccagcctcaacgcctacaactcactgacaaggtcggggctgaagcgtacgccctcgctaaagccggacgtaccccccaaaccatcctttgctcccctttccacatccatgaagcccaatgatgcgtgtacataatcccagggggagggggtcaggtgtcgaaccagcaggcaaggcgaggtgcccgctcagctcagcaaggttctcaactgcctcgagtacccaccagaccaagaargcctgcggcagagccgaggacgctgggtcctcctctctgggacacaggggtactcacgaaaactgggccgcgtggtttggtgaaggtttgcaacggcggggactcaccttcattctcttccttcactttcccccacaccctacaacaggtcggacccacaaaagacttcagttatcatcacaaacatgagccaaaagcacatacctaccccatcccccacccccmcacacacacacacatgcacacaacacatacacacacacgcacagaggtgaacagaaactgaaacattttgtccacaacttcacgggacgtggccagactgggtttgcgttccaacctgcaaaacacaaatacattttttaaaatcaagaaaatttaaaaagacaaaaaaaaaagaattcattgataattctaactcagactttaacaatggcagaagtttactatgcgcaaatactgtgaaatgcccgccagtgttacagctttctgttgcagcagataaatgccatgttgggcaactatgtcatagatttctgctcctcctctcttttaatgaaataacgtgaccgttaacgcaagtaactctttatttattgttcaccctttttttccttaaggaaaggactcttccaaatatcatcctatgaacagctcttcagaaagcccattgaaagttaaactatttaacgtgaaatccattaactggaataattgagtttctttatttttacaataaattcactgagtaaataaaaaaaaaaaaaaaaaaaaaaaaa

SEQ ID NO: 61 - DNA, 1672 bp, Homo sapiens
  misc_feature (884): n equals a,t,g, or c
  misc_feature (1583): n equals a,t,g, or c
  misc_feature (1645): n equals a,t,g, or c
  misc_feature (1663): n equals a,t,g, or c
ccagcctccaggcacccgggatccagcgccgccgctcataacacccgcgaccccgcagctaagcgcagctcccgacgcaatggacccggcgctggcagcccagatgagcgaggctgtggccgagaagatgctccagtaccggcgggacacagcaggctggaagatttgccgggaaggcaatggagtttcagtttcctggaggccatctgtggagtttccagggaacctgtaccgaggagaaggcattgtatatgggacactagaggaggtgtgggactgtgtgaagccagctgttggaggcctacgagtgaagtgggatgagaatgtgaccggttttgaaattatccaaagcatcactgacaccctgtgtgtaagcagaacctccactccctccgctgccatgaagctcatttctcccagagattttgtggacttggtgctagtcaagagatatgaggatgggaccatcagttccaacgccacccatgtggagcatccgttatgtcccccgaagccaggttttgtgagaggatttaaccatccttgtggttgcttctgtgaacctcttccaggggaacccaccaagaccaacctggtcacattcttccataccgacctcagcggttacctcccacagaacgtggtggactccttcttcccccgcagcatgacccggttttatgccaaccttcagaaagcagtgaagcaattccatgagtaatgctatcgttacttcttggcaaagaactcccgtgactcatcgaggagctccagctgttgggacaccaaggagcctgggagcacgcagaggcctgtgttcactctttggaacaagctgatggactgcgcatctctgagaatgccaaccagaggcggcagcccancccttcctgcctcctgccccactcagggttggcgtgtgatgagccattcatgtgttccaaactccatctgcctgttacccaaacacgcctctcctggcagggtagacccaggcctctaaccatctgacagagactcggcctggacaccatgcgatgcactctggcaccaaggctttatgtgcccatcactctcagagaccacgtttccctgactgtcatagagaatcatcatcgccactgaaaaccaggccctgttgccttttaagcatgtaccgctccctcagtcctgtgctgcagccccccaaatatatttttctgatatagaccttgtatatggctttaatgccgcaaaatatttatttttccttaaaaaaggtgtcaacttggaaataatggtttaaaaacaggataagcattaaggaaaaacactttcaatgtgtcttccatttgatgaatttgtkttkctctctttatccccgcaagtggagtttcatgtcctcggtgaaaccagacagtgtgaatctgttccagcccaaatctgcagcattagggatgagttctcrgaagtgattctgaactgagcacgcactcatgtctgcatggggaactctggggagaagagccttccttttctttcccttgggccatttgcctttccttgtcgtcttactgagggcggaggcagggagggtctctgtnctttccagggccctgggcagggccatcctggccattcagggaaagatgggaagagttagggnctccgttttaggcagccntgggtggga

SEQ ID NO: 62 - DNA, 1540 bp, Homo sapiens
  misc_feature (1265): n equals a,t,g, or c
  misc_feature (1468): n equals a,t,g, or c
  misc_feature (1507): n equals a,t,g, or c
gcggacggtgggtcgacccacgcgtccgctactaacaacttaccacagtgcggagactgctttctgaaaaggccactcacgtgaacactagggatgaagatgagtrtacccctcttcatcgagcagcctacagtggacacttagatattgttcaggagctcattgcacagggggccgatgttcatgcagtgactgtggatggctggacgcccctgcacagtgcttgtaagtggaataataccagagtggcttctttcttactgcagcatgatgcagatatcaatgcccaaacaaaaggcctcttgacccccttgcatcttgctgctgggaacagagacagcaaggataccctagaactcctcctgatgaaccgttacgtcaaaccagggctgaaaaacaacttggaagaaactgcatttgatattgccaggaggacaagtatctatcactacctctttgaaattgtggaaggctgtacaaattcttcacctcagtcttaacaattctagtaattttcctaagtttctaaataccagtgcctcctgtgtgtgagatgtattcccataatcaaagttgacgtcaaacatcttactacaaaaattcagtgacattcattataacattcttccaagtgaattgcctgactttratgtcaaaatgtatttgaaagtaatttgcatatatctttaattatttctgtggagtttgtgatttttttatcagaaataattttaatgtgtgtatacttaaaaacttgacacgggttgtacagaaactggtatttttggtgctgatacaagagaaatgtatttttaaatatcccacatcctggatctttgttgggtatttagtatattgacatatatttttataaggtgaggtaactcagaacttaatttaaaagtcttaaatattctgatacaattcagctgtcttctctaccttaccatagccagttgctttcattttaaaccagagcaagtaacatattagtgacttgaatcttcataagttaaagtaaaaaacagcaaaaaacctagatctttgtcttttagaacacagaccattttcaggaaagcagttagctaagtgtttaattcatgaatattgtatactgcatcccctaccacaatttacacaatcctgtggatagtcctacctcaccctggtcaacctacatgatccttaagctaatggcgaatcacgatgaccttgtagacatgcacacaactatacctttgtccaacagatcataatatatctgnctatccaactggttttacctgcctaatcctactgatttgggcactgcttgtatartctctcaagttcacaggaaatgttgattttctaaggtcctcatttttacagagtatacaggcaaagtgacaggggaaaaggaattagtctaagagtaaggggatgattattatrttgaggstaaaaccacaaagtggctcaggctttnaaaaaaaaacactgtggataatgacaaaaagcataagtnaaaatatttgagaaaaataaagtacaagaaatg

SEQ ID NO: 63 - DNA, 1044 bp, Homo sapiens
aacaccttcatccatgaagatatctggaacattcgtagtatctgcagcaccaccaatatccaatgcaagaacggcaagatgaactgccatgagggtgtagtgaaggtcacagattgcagggacacaggaagttccagggcacccaactgcagatatcgggccatagcgagcactagacgtgttgtcattgcctgtgagggtaacccacaggtgcctgtgcactttgacggttagatgccaccatgtagggattatcgcgagtggttgaccttacacttactccttaaatagcagtgagtaatgcatttgagctgtcccaggctctgtctcctcagctcatttcctactctttttctctatataactcattctattaaatacattgcaccaaagagatatggagacataaacctgtaatgaatgaggctgggcttttctgtaataagcttccttttataatactggtcagcttagctctctcagatcctatcctgtggaatttagttattatgtgtatttatgtagtatttcaaacatttcaaaatgctttcatctatgtttatcacattttaataccacagcacttataatgatgtcactacatatagaagctcaaagttaagggatttgctgaagactgtaaagttaatggaagaattgagacaaaaatccagtgtagctggccacttatccagggctttttctacttcatcacaaggaatgttttgaaagtgtctgctttttttatccttaaaattcacctgtcagggaggcattaaaaatttggaaatgtatgccagcaaaatgtgagctctgtattttttggcattcttatgtttgggtttaataagattaagaaaatgatactgggaattttctttttcctgaaactttgaatcaccctagtaagtcaaagtactaaaaaatgtactagatcattaagacttatgtgctcttactgattgaaagattttttatgttttccttgtaataaaggacctaaaccgaaggtacctgaaaaaaaaaaaaaaaaaaaaactcgag

SEQ ID NO: 64 - DNA, 851 bp, Homo sapiens
cacgagagaaggtggttatttatacaaacatggacatactcactcccaagggctgatgagatgctgaattttctttgggggcattcattaattgtcccagctgcagcgactggagcaagtctggaagctgcctgtgctaagaccacccagctgtccctgggttctcatcctagggccttctttgcttccaggtcaggggacctgcttcaatgagaaagcaactgaattgaggctaggagaggtagggagagctgagttctgacttcacctgtgcagaactctctgcccccatgttacctggactggaacagactgtgaatatagcagaaggttccaagaactctggtgtctgacctagaagaggcacagttctctctactggaaagaaaacgatgtagccgattgcacaagggtgccaagggaagacccaggatggcccatcaaaggaacctgggggaggatgcaggaggctgaagggatgcacctggcatttctctcactgtgctcttaccgcatcagcaacccccaacttttgggcctactctgccccccatgcgtgaataccctgcttggatgctgtgcttttccggtttgtctctaagcccctttctccagggcatgttggtttccctggcctctcagtgtcctaactggagcccagagtgccttgttctgagccaggagacggctgagcactggccctccacacctaagcgtcctttacattaacttattggtcttgtataacacctggtgccattgccaagtggctgtgtcctcagctacagagctggaattgtgtggggtttagtgctaaatacttcaataaagtctgttttttgtgattggct

SEQ ID NO: 65 - DNA, 2793 bp, Homo sapiens
  misc_feature (2793): n equals a,t,g, or c
ccacgcgtccggattacatgtagttattgagaatcctttcgaattcagtggcttaatcatgaatgtctaaatattgttgacattaggatgatacatgtaaattaaagttacatttgtttagcatagacaagcttaacattgtagatgtttctcttcaaaaatcatcttaaacatttgcatttggaattgtgttaaatagaatgtgtgaaacactgtattagtaaacttcatcacctttctacttccttatagtttgaacttttcagtttttgtagttcccaaacagttgctcaatttagagcaaattaatttaacacctgccaaaaaaaggctgctgttggcttatcagttgtctttaaattcaaatgctcatgtgacttttatcacatcaaaaaatatttcattaatgattcacctttagctctgaaaattaccgcgtttagtaattatagtgggcttataaaaacatgcaactctttttgatagttatttgagaattttggtgaaaaatatttagctgagggcagtatagaacttataaaccaatatattgatatttttaaaacatttttacatataagtaaactgccatctttgagcataactacatttaaaaataaagctgcatatttttaaatcaagtgtttaacaagaatttatattttttattttttaaaattaaaaataatttatatttcctctgttgcatgaggattctcatctgtgcttataatggttagagattttatttgtgtggaatgaagtgaggcttgtagtcatggttctagtgtttcagtttgccaagtctgtttactgcagtgaaattcatcaaatgtttcagtgtggttttctgtagcctatcatttactggctatttttttatgtacacctttaggattttctgcctactctatccagttgtccaaatgatatcctacattttacaaatgccctttcagtttctattttctttttccattaaattgccctcatgtcctaatgtgcagtttgtaagtgtgtgtgtgtgtgtctgtgtgtgtgtgaatttgattttcaagagtgctagacttccaatttgagagattaaataatttaattcaggcaaacatttttcattggaatttcacagttcattgtaatgaaaatgttaatcctggatgacctttgacatacagtaatgaatcttggatattaatgaatttgttagtagcatcttgatgtgtgttttaatgagttattttcaaagttgtgcattaaaccaaagttggcatactggaagtgtttatatcaagttccatttggctactgatggacaaaaaatagaaatgccttcctatggagagtatttttcctttaaaaaattaaaaaggttaattattttgaaaaaaaaaaatcgacccacgcgtccggattacatgtagttattgagaatcctttcgaattcagtggcttaatcatgaatgtctaaatattgttgacattaggatgatacatgtaaattaaagttacatttgtttagcatagacaagcttaacattgtagatgtttctcttcaaaaatcatcttaaacatttgcatttggaattgtgttaaatagaatgtgtgaaacactgtattagtaaacttcatcacctttctacttccttatagtttgaacttttcagtttttgtagttcccaaacagttgctcaatttagagcaaattaatttaacacctgccaaaaaaaggctgctgttggcttatcagttgtctttaaattcaaatgctcatgtgacttttatcacatcaaaaaatatttcattaatgattcacctttagctctgaaaattaccgcgtttagtaattatagtgggcttataaaaacatgcaactctttttgatagttatttgagaattttggtgaaaaatatttagctgagggcagtatagaacttataaaccaatatattgatatttttaaaacatttttacatataagtaaactgccatctttgagcataactacatttaaaaataaagctgcatatttttaaatcaagtgtttaacaagaatttatattttttattttttaaaattaaaaataatttatatttcctctgttgcatgaggattctcatctgtgcttataatggttagagattttatttgtgtggaatgaagtgaggcttgtagtcatggttctagtgtttcagtttgccaagtctgtttactgcagtgaaattcatcaaatgtttcagtgtgstyttctgtagyctatcatttactggctatttttttatgtacacctttaggattttctgcctactctatccagttgtccaaatgatatcctacattttacaaatgccctttcagtttctattttctttttccattaaattgccctcatgtcctaatgtgcagtttgtaagtgtgtgtgtgtgtgtctgtgtgtgtgtgaatttgattttcaagagtgctagacttccaatttgagagattaaataatttaattcaggcaaacatttttcattggaatttcacagttcattgtaatgaaaatgttaatcctggatgacctttgacatacagtaatgaatcttggatattaatgaatttgttagtagcatcttgatgtgtgttttaatgagttattttcaaagttgtgcattaaaccaaagttggcatactggaagtgtttatatcaagttccatttggctactgatggacaaaaaatagaaatgccttcctatggagagtatttttcctttaaaaaattaaaaaggttaattattttgaaaaaaaaaaacn

SEQ ID NO: 66 - DNA, 303 bp, Homo sapiens
  misc_feature (108): n equals a,t,g, or c
  misc_feature (278): n equals a,t,g, or c
agattaagcatacttaaccactccttatttgtagattcactttcaaccttaaaaattaataccagtttgcataaaccaatatctgaaaagaacaggaaatgttaatgncaagcaacagctattaatactgatgtgaatggatgcatttgttttgcagtggtgactggcctaggcaggtttgggatctgtgaaagaattgattcattttcaaaattattccataaagttaaaaagttacactttaaaggcaacaggtcatacagttctttaaaatctgnatccaactgtagctttatttaaaag

SEQ ID NO: 67 - DNA, 1410 bp, Homo sapiens
ccacgcgtccggtccctaggagataagagtatcttgcacagcaggtgcaggtttcccagcagctcaggcaagagtccgatgtttgtgccatctgatcctgatgtctggagagatagccatgtgtgagcctgaatttggcaatgacaaggccagggagccgagcgtgggtggcaggtggcgagtgtcctggtacgaacggtttgtgcagccatgtctggtcgaactgctgggctctgctctcttcatcttcatcgggtgcctgtcggtcattgagaatgggacggacactgggctgctgcagccggccctggcccacgggctggctttggggctcgtgattgccacgctggggaatatcagtggtggacacttcaaccctgcggtgtccctggcagccatgctgatcggaggcctcaacctggtgatgctcctcccgtactgggtctcacagctgctcggggggatgctcggggctgccttggccaaggcggtgagtcctgaggagaggttctggaatgcatctggggcggcctttgtgacagtccaggagcaggggcaggtggcaggggcgttggtggcagagatcatcctgacgacgctgctggccctggctgtatgcatgggtgccatcaatgagaagacaaagggccctctggccccgttctccatcggctttgccgtcaccgtggatatcctggctgggggccctgtgtctggaggctgcatgaatcccgcccgtgcttttggacctgcggtggtggccaaccactggaacttccactggatctactggctgggcccactcctggctggcctgcttgttggactgctcattaggtgcttcattggagatgggaagacccgcctcatcctgaaggctcagtgaagcagagctcgtgggattcctgctgctccaggtgtcctcagctcacctgtcccagactgaggacaggggagttcctgcatttcctgccagggcagaggcccagaggagcgaccccctgcttccactgcttgggcctgctttctcagatagactgactgctgaggaggctctaggttcttggaattcctttgtgctcatcagagaccccagcctggggaacacgctgcccgcactgcccagagagcagtgcaaacaccacaacacgagcgtgtttcttgagaggaatgtccccgagttggacaaggaggctgtttctgcacatcagctcatttcccgcaccccatttcttgcttgattgctttgttgggggcctggccacttccttgcttctcaagctgacaattctcactttgcaataaatagtccagtgtttccttccaaaaaaaaaaaaaaaaaaaaaaaaaaaaaaaaaaaaaaaaaaaaaaaaaaaaaaaaaaaaaaaaaaaaaaaaaaaaaaaaaaaaa

SEQ ID NO: 68 - DNA, 1024 bp, Homo sapiens
  misc_feature (2): n equals a,t,g, or c
  misc_feature (7): n equals a,t,g, or c
anggganggaagggaagggaagggaagggggggtcacgcgggggcgcgcgcgcgcaccgggagccgctcgraggcgagtggaactggatcgggtttgctgccagcggcgtgagcttcggccgccattttacaacagctccactcgcgccggacacagggagcagcgagcacgcgtttcccgcaacccgataccatcggacaggatttctccgcctcagcccaacggggagatctctggaaacatggctacagaacatgttaatggaaatggtactgaagagcccatggatactacttctgcagttatccattcagaaaattttcagacattgcttgatgctggtttaccacagaaagttgctgaaaaactagatgaaatttacgttgcagggctagttgcacatagtgatttagatgaaagagctattgaagctttaaaagaattcaatgaagacggtgcattggcagttcttcaacagtttaaagacagtgatctctctcatgttcagaacaaaagtgcctttttatgtggagtcatgaagacttacaggcagagagaaaaacaagggaccaaagtagcagattctagtaaaggaccagatgaggcaaaaattaaggcactcttggaaagaacaggctcacacttgatgtgaccactggacagaggaagtatggaggaccacctccagattccgtttattcaggtcagcagccttctgttggcactgagatatttgtgggaaagatcccaagagatctatttgaggatgaacttgttccattatttgagaaagcataaggttctcagagtgatagagctggaaggatcataaaggtcatctagtctaatggttctcaaactcgaaggaacattagggtcatcctggagagtttactgggccccgtctcagaggttctgatgctgtaaatcaggcgggacccctgaattttcatttctaagaagctcacaggtgctactaatgttgaagagaacctatgatctagttcaacttctgggattctt

SEQ ID NO: 69 - DNA, 1848 bp, Homo sapiens
  misc_feature (1761): n equals a,t,g, or c
  misc_feature (1844): n equals a,t,g, or c
  misc_feature (1847): n equals a,t,g, or c
agactcggatggtagtccgctgtccaacagccarccttccttcccagtggagatcttgcccttcctctacttgggctgtgccaaagactccaccaacttggacgtgttggaggaattcggcatcaagtacatcttgaacgtcacccccaatttgccgaatctctttgagaacgcaggagagtttaaatacaagcaaatccccatctcggatcactggagccaaaacctgtcccagtttttccctgaggccatttctttcatagatgaagcccggggcaagaactgtggtgtcttggtacattgcttggctggcattagccgctcagtcactgtgactgtggcttaccttatgcagaagctcaatctgtcgatgaacgatgcctatgacattgtcaaaatgaaaaaatccaacatatcccctaacttcaacttcatgggtcagctgctggacttcgagaggacgctgggactcagcagcccatgtgacaacagggttccagcacagcagctgtattttaccaccccttccaaccagaatgtataccaggtggactctctgcaatctacgtgaaagaccccacacccctccttgctggaatgtgtctggcccttcagcagtttctcttggcagcatcagctgggctgctttctttgtgtgtggccccaggtgtcaaaatgacaccagctgtctgtactagacaaggttaccaagtgcggaattggttaatactaacagagagatttgctccattctctttggaataacaggacatgctgtatagatacaggcagtaggtttgctctgtacccatgtgtacagcctacccatgcagggactgggattcgaggacttccaggcgcatagggtagaaccaaatgatagggtaggagcatgtgttctttagggccttgtaaggctgtttccttttgcatctggaactgactatataattgtcttcaatgaagactaattcaattttgcatatagaggagccaaagagagatttcagctctgtatttgtggtatcagtttggaaaaaaaaatctgatactccatttgattattgtaaatatttgatcttgaatcacttgacagtgtttgtttgaattgtgtttgttttttcctttgatgggcttaaaagaaattatccaaagggagaaagagcagtatgccacttcttaaaacagaacaaaacaaaaaaagaaaattgtgctcttttctaatccaaagggtatatttgcagcatgcttgactttaccaattctgatgacatctttacggacactattatcactaagaccttgttatggcgaagtctttagtctttttcatgtattttcctcatgattttttctctttatgtagtttgactatgccttacctttgtaaatatttttgcttgtgttgtcgcaaaggggataatctgggaaagacaccaaatcatgggctcactttaaaaaaagaaagaataaaaaaaccttcagctgtgctaaacagtatattacctctgtataaaattcttcagggagtgtcacctcaaatgcaatactttgggttggtttctttcctttaaaaaaatttgtataaaactggaagtgtgtgtgtgtgagcatgggtacccatttgataagagaaatgcatttgattgtgaagaagggagagttaaattctccattatgttcgtggtgtaaagtttwgagctggaatttattataagaatgtaaaaccttaaattattaataaataactattttggctanaaaaaaaaaaaaaaaaaaaaaaaaaaaaaaaaaaaaaaaaaaaaaaaaaaaaaaaaaaaaaaaaaaaaaaaaaaaaggggggnccnc

SEQ ID NO: 70 - DNA, 2682 bp, Homo sapiens
  misc_feature (647): n equals a,t,g, or c
gaataccccaggatttatgtataaaaacctgcagtgtctggttattgatgaagctgatcgtatctttgatgtggggtttgaagaggaattaaagcaaattattaaacttttgccaacacgtagacagactatgctcttttctgccacccaaactcgaaaagttgaagacctggcaaggatttctctgaaaaaggagccattgtatgttggcgttgatgatgataaagcgaatgcaacagtggatggtcttgaacagaagaaccgaaagaagaagcttatggtcttcttttcatcttgtatgtctgtgaaataccactatgagttgctgaactacattgatttgcccgtcttggccattcatggaaagcaaaagcaaaataagcgtacaaccacattcttccagttctgcaatgcagattcgggaacactattgtgtacggatgtggcagcgagaggactagacattcctgaagtcgactggattgttcagtatgaccctccggatgaccctaaggaatatattcatcgtgtgggtagaacagccagaggcytaaatgggagagggcatgccttgctcattttgcgcccagaagaattgggttttcttcgttacttgaaacaatccaaggttccattaagtgaatttngacttttcctggtctaaaatttctgacattcagtctcagcttgagaaattgattgaaaagaattactttcttcataagtcagcccaggaagcatataagtcatacatacgagcctatgattcccattctctgaaacagatctttaatgttaataacctaaatttgcctcaggttgctctgtcatttggtttcaaggtgcctcccttcgttgatctgaacgtcaacagtaatgaaggcaagcagaaaaagcgaggaggtggtggtggatttggctaccagaaaaccaagaaagttgagaaatccaaaatctttaaacacattagcaagaaatcatctgacagcaggcagttctctcactgaacacatgccttcctttcatcttgaataactttgtcctaaaatgaattttttttccccttgatttaacaggatttttgtagactttagaatttggacttacctaacaagagtataaattgacttgggttgcaagcactgagcactgttacttctatcacgtctctcttttatttctgggatataaaacaggctttaagtttcttggttgcccaagggcagagcaaggaatatctggtgtttcttgtgatgataatattttaattttaaatatccctccctcatacaagtgtatgttaccattttaatataattctttttgtacctttccttcttgttttgtgaagatttttgtggcatggattgctgtgctcactgctgtaaaaggtgacctagtgtactgggcagctggtggcggtgcagaaaagagtctcaggttattttttgtttttagttatttcttggaccttgacagtatctaatgactcctcctgaaaatgctgcagtataaaagagcaaagagctttgggaaatacctaagaagcaccttaagattagggtggcattgcttttatagattcttgattttaaagcaacaggcctttctcaggtgttgcattttttggagcaaaaactatgggttgtaatttgaataaagtgtcactaagcagttataacgtttgatggctggggggtaggaagaggatggaattgagatgtttgagcctcatttacatcaatagaggtgtaatgtactgcatttcttcatttggtaacataacaaagactttcatacaaagaacgatgatgctcctcattaagatttgtttaattcaaggtggtttggatttggtaagcctttgcactctgtagagtacttagaagacaagggcaacttacttggagttagagccaagctgtcagacggtgcccagcacacattaatgttagcttctttctgagaaaaaaatacctcttccaggccctgaaacaaaaaatacatttgctgtgaagattgaaaatgaacaaagttagaaaaaaaaacagcaaaatcagtgatttagtcagatgagtttttcgttgtaggagcacttgatttctagtgtgttttgtacagtatataactacaagatagtacattttgtagcagttcaaagccaaagttgctagcatcattttgctgttgtgccagttaatcataggatcccattaaataagtgtgctaacatcgaatatagagaaaactggtaaagaacattccagtaggaaaagaaaagaacaatcttccatttctgggcttggccaccatcaccctggtcggacctgtcctggacttccaaccttgactgctgagctcctggcttagcttcttgggttcctaattcctggtgtttaataattctctccacgatcatgtttttctgattttttttttcagaaataatgttttttaaaagacaaaaacaaagggaagaatatttaattactgagcagaagtaaatactgttggtattttgtacataatctaatttttatatgcatgttyatgctttttaatttttttatcaaaaattaagtcatctacctactacttgtaaccagcttgtttcataacatgttattttcctgtgtcattaaataattacttcaatgttgaaaaaaaaaaaaaaaaaaaaaa

SEQ ID NO: 71 - DNA, 412 bp, Homo sapiens
ggcagagccaacagacaccctccactctgaggtctcaccttcgcctttgctgaagtctccccgcagccctctccacccagaggtctccctataccgagacccaccatsswwccatcctgaggaccgccccaaccctcggagccccccactcagtaggtctgaaggcctccatttgtaccgaaacaccccgctcacgctgacagcctcctaggytccctgaggtacctttccacccagaccctccttccccaccccataagccctgagactcccgcctttracctgacgatcttcccccttcccgccttcaggttcctcctaggcgctcagaggccgctctggggggttgcctcgagtccccccacccctccccacccaccaccgctcccgcggcaagccagcccgtgcagaa

SEQ ID NO: 72 - DNA, 1361 bp, Homo sapiens
  misc_feature (46): n equals a,t,g, or c
taagaacttttgtccttcccttcttgaggtccttttttgattgtgnctttagtatcaagttcagcagttgtttcaagagcagctgagataatwaattcaaccaaatggcgccttggttctttawggtatctgawactcctctaggacttgcgagggccgtgtcctgagtagtgtgtgmcccttggctcacgttgcctctgttttcctcaagttgccagacttagaagmcttgatgaaaagggagaaccagaagattctgactcccctggtgagcctggacaccccagggaaagcaacagtacaggtggtcattctggccgaccctgacggacatgaaatttgctttgtcggggatgaagcatttcgagaactttctaagatggatccagagggaagcaaattgttggatgatgcaatggcagcagataaaagtgacgagtggtttgccaaacacaataaacccaaagcttcaggttaacggaagacatgatgcagagcaagcctctgtgattcctgcccagcacctgtgaggcctgacgtgtcagttcccaataaatgctcttctgatttgtttcccgtacaggcaaggaggcttgggtagtgcagatttgtgtatttcaatctttgaaagctctgatgtaatttagaaatgaaatccaatcatgagtccaggtagagaacgcctgctgtaatctacactgttgctgggactgcgcattctgtatataactgtgttggatgagtgacagatgattgtccagactaggacagcggcatgaacatgactttggttgggattgcggatagttagggttacctctgaatcgtgtagcttttatgagagcagctgtgcaagtgaatccacattaatgccttgtcgtggtgccattcccagcgcctgacgatacgctcttctattgtcttattctggcaggttttgacgttttaaattttttaaagaaattttattccttggaccaaaaggtttggttaaccacccccctcttacttgctttcacattttgagtgtccagaggaaacagaaaggaatgagtgtgtgacgttgctgcacgcctgactctgtgcgagcttctttctgtgtatatattttgttttatttttttccgtgtatatttttaatcccgacagaacatcatgtgagatttctttaaaatggattaaacgatttcttcagcctgaaaaaaaaggttttgaaaatgttttcttgtagttttgtttggttctaaacaacaaataggttttaatcactcgaaatggaattatattgtgtattcattgaataaattttttttgaaagtaagcttctgaaatcaaaaaaaaaaaaaaaaaaaaaaaaaaaa

SEQ ID NO: 73 - DNA, 928 bp, Homo sapiens
cagcaatggcagcatctgccttgatatcctgcggtctcagtggtctccagcgttgactgtgtcaaaagttctcttgtccatctgctcgctgctctgcgaccccaaccccgatgaccccctggtgccagagatagcacacacctacaaggccgacagagagaagtacaacagactagcaagagagtggacacaaaaatatgctatgtaagtgccttggaggttttacatgagacactgtccaagagaagctggcagagaggtcttcccttaaaactttgggctgttggctgagccattcaaagagcatcatctgttcttcaaacaaatgttggtcacccactctctccagctgcagcatgttggtgccattttcagcaattacggctttgacagtgccacctctttgatgccaaatcagcaaccattgttgttatgatctgcagtcttcctggtgacactggaatctctctctctgccgcctcagtttgtctgctggtctcttggggggccaggcctgcacgtctctcctacccggcctcaaatggtgctgctgcccatgatggtaccacaccagggcctcagcctggcccctcaccacataccctttgccttttagaactcagtgccatcctgggtgcccagggcagarcaggctttgttcgcacctcatctgctgcagaaccacatcctgaggagtctcagcttatcctggagggaattgggaacagtgtcactgggaagtgaaggcctagccctgtggcttccaccagtctcctcctgcagtgccacgtggtgaattttctcgccttcacaccaagaaagcagcaaagtggaaaattttcaaggatacaaaggcacataacamccccataagragatgattaaggttttttagaagcaagagcaaaattttgaaaacctctaggag

SEQ ID NO: 74 - DNA, 1186 bp, Homo sapiens
gcggacgcgtgggcagcccgggcggctgcccttgggtgctcccttccctgcccgacacccagaccgaccttgaccgcccacctggcaggagcaggacaggacggccggacgcggccatggccgagctcccggggccctttctctgcggggccctgctaggcttcctgtgcctgagtgggctggccgtggaggtgaaggtacccacagagccgctgagcacgcccctggggaagacagccgagctgacctgcacctacagcacgtcggtgggagacagcttcgccctggagtggagctttgtgcagcctgggaaacccatctctgagtcccatccaatcctgtacttcaccaatggccatctgtatccaactggttctaagtcaaagcgggtcagcctgcttcagaacccccccacagtgggggtggccacactgaaactgactgacgtccacccctcagatactggaacctacctctgccaagtcaacaacccaccagatttctacaccaatgggttggggctaatcaaccttactgtgctggttccccccagtaatcccttatgcagtcagagtggacaaacctctgtgggaggctctactgcactgagatgcagctcttccgagggggctcctaagccagtgtacaactgggtgcgtcttggaacttttcctacaccttctcctggcagcatggttcaagatgaggtgtctggccagctcattctcaccaacctctccctgacctcctcgggcacctaccgctgtgtggccaccaaccagatgggcagtgcatcctgtgagctgaccctstctgtgaccgaaccctcccaaggccgagtggccggagctctgattggggtgctcctgggcgtgctgttgctgtcagttgctgcgttctgcctggtcaggttccagaaagagagggggaagaagcccaaggagacatatgggggtagtgaccttcgggaggatgccatcgctcctgggatctctgagcacacttgtatgagggctgattctagcaaggggttcctggaaagaccctcgtctgccagcaccgtgacgaccaccaagtccaagctccctatggtcgtgtgacttctcccgatccctgagggcggtgagggggaatatcaataattaaagtctgtgggtaccaaaaaaaaaaaaaaaaaagtcgacgc

SEQ ID NO: 75 - DNA, 933 bp, Homo sapiens
  misc_feature (791): n equals a,t,g, or c
  misc_feature (794): n equals a,t,g, or c
gtctggatcatattgtagataaagtaaaagaatgtgtggatcatttaagtagagatgaggatgaagagaaactggtagcctcactatggggagcagagagatgtttacgagttttagaaagtgtaactgtgcataatcccgaaaatcaaagctacttgatagcatataaagattcccaacttattgtttcatcagctaaagcattacagcattgtgaagaactgattcagcagtacaaccgtgctgaggacagcatatgcttagctgacagtaagcctctgcctcaccagaatgtaactaaccatgtaggcaaagcagtggaggactgcatgagggccatcatcggggtgttgcttaatttaactaatgataatgagtggggcagcaccaaaacaggagagcaggacggtctcataggcacagcgctgaactgtgtgcttcaggttccaaagtacctacctcaggagcagagatttgatattcgagtgctgggcttaggtctgctgataaatctagtggagtatagtgctcggaatcggcactgtcttgtcaacatggaaacatcgtgctcttttgattcttccatctgtagtggagaaggggatgatagtttaaggataggtggacaagttcatgctgtccagctttagtgcagctattccttgagcgagagcgggcagcccagctagcagaaagtaaaacagatgagttgatcaaagatgctcccaccactcagcatgataagagtggagagtggcaagaaacaagtggagaaatacagtgggtgtcantgnaaaagactgatggtacagaagagaaacataagaaggaggaggaggatgaagaacttgacctccaataaaggtatatttactttgaatggtgtatttaaattgaagatagtggtttgattttgtttttttcctccaaacc

SEQ ID NO: 76 - DNA, 1964 bp, Homo sapiens
ggtttggcagggcggggcgcctcgcgaagatggtggcgcgcgtggcgtgtggctcccgtcgtctggccaagtctcagcgcagcgcaccggccggcgtctcgttggcctggagcccacacccaccgggtccctgaccccgcgccccccgcgcccggttcccggcatgcctcgcgcccgtaagggcaacacgctccggaagggtggtcagcgccgtggaggaggtgcccggagcagtgcccaagctgactcgggttccagtgacgatgaggcagccagtgaggcccgcagcaccgccagtgaatgccccagccttctcagcaccactgcagaggacagccttgggggggatgtcgtggatgagcagggccagcaggaagaccttgaggaaaagctgaaggagtatgtggactgtctcacagacaagagtgccaagacccggcaggtgctcttgagagcctgcgcctggccctagcgtcccgcctactccccgacttcttgctggagcgccgcctcacgctagccgatgccctggaaaagtgcctcaagaaagggaagggcgaggaacaagccctggctgctgctgtgctaggcctgctctgcgtgcagctgggccctggacctaagggtgaggagctgtttcacagcctgcagcctctgctggtctctgtgctcagtgacagcacagctagccctgctgcccggctccactgtgcttctgcccttggcctgggctgctacgtggctgccgctgacatccaggacctggtctcttgccttgcctgcttagaaagtgttttcagccggttctatggcttggggggcagctccacaagtcctgtggttcctgccagcctgcacggcctgctctctgctgccctgcaggcctgggcattgctgctcaccatctgccctagcacccaaatcagccacatccttgacaggcagctgccccggctgccccagctcttgtccagtgaaagtgtgaacctgcggatcgctgccggtgaaaccattgcactgctctttgagcttgcccgggaccttgaggaggagtttgtttacgaggacatggaggccctctgcagtgtcctgcgcactctggccactgacagtaacaagtaccgtgccaaggctgatcgtcggcgccagcgctctactttccgcgccgtgctgcactccgtggagggcggtgaatgcgaagaagagatagtgcgcttcggctttgaggtgctctacatggacagctgggctcggcaccggatctacgctgccttcaaggaagtgctgggttcgggcatgcaccaccacctccagaacaatgagctactccgtgacatctttggcctgggccctgtgctgttgctggatgccactgccctgaaggcctgcaaggttccacgctttgagaagcacctgtacaatgctgctgccttcaaagcccggaccaaggctcgaagccgtgtgcgggacaagcgggcagacatcctgtgaagcaggacctgctgaagaggagactttctatgcccttggtccgtatttttaacagaagacagtgcaacaactggtctccaccagtatttgtcactttattttttttaatgacaaaaccaaaaacagacatggggtgggtagctgggggcccggacacttgggaccctgacccctttgtccctgcactcagccctgtggccccttcctgtcctgtctcaggccaggctaaatatgtgccttcctcagggctgtggggcaggcactagggggcctttcccttcctttcctttctcaggccttgctcccccaggatgacccactcttaggggggtggtggcatctggacaaatgccaccacagcaggtggggtggcaaagctacctggaatggatttgtgtgctgatttttaaggattattacagataattaaacagaacggtcagccttcaaaaaaaaaaaaaaaaaaaaaaaaa

SEQ ID NO: 77 - DNA, 1802 bp, Homo sapiens
  misc_feature (1680): n equals a,t,g, or c
  misc_feature (1747): n equals a,t,g, or c
  misc_feature (1757): n equals a,t,g, or c
  misc_feature (1800): n equals a,t,g, or c
acgcgtccgcttccatctgctctggaattaaatatgcatttcaggtgattggagagctacattcccaactcgatggatccgaagtactgctgctgactgatggggaggataacactgcaagttcttgtattgatgaagtgaaacaaagtggggccattgttcattttattgctttgggaagagctgctgatgaagcagtaatagagatgagcaagataacaggaggaagtcatttttatgtttcagatgaagctcagaacaatggcctcattgatgcttttggggctyttacatcaggaaatactgatctctccsagaagtcccttcagctcgaaagtaagggattaacactgaatagtaatgcctggatgaacgacactgtcataattgatagtacagtgggaaaggacacgttctttctcatcacatggaacagtctgcctcccagtatttctctytgggatcccagtggaacaataatggaaaatttcacagtggatgcaacttccaaaatggcctatctyagtattccaggaactgsaaaggtgggcacttgggcatacaatcttyaagccaaagcgamcccagaaacmttaactattacagtwacttctcgagcakcaaaattcttctgtgcctccaatcacagtgaatgctaaaatgaataaggacgtaaacagtttccccagcccaatgattgtttacgcagaaattctacaaggatatgtacctgttcttggagccaatgtgactgctttcattgaatcacagaatggacatacagaagttttggaacttttggataatggtgcaggcgctgattctttcaagaatgatggagtctactccaggtattttacagcatatacagaaaatggcagatatagcttaaaagttcgggctcatggaggagcaaacactgccaggctaaaattacggcctccactgaatagagccgcgtacataccaggctgggtagtgaacggggaaattgaagcaaacccgccaagacctgaaattgatgaggatactcagaccaccttggaggatttcagccgaacagcatccggaggtkcatttgtggtatcacaagtcccaagccttccttgcctgaccaatacccaccaagtcaaatcacagaccttgatgccacagttcatgaggataagattattcttacatggacagcaccaggagataattttgatgttggaaaagttcaacgktatatyataagaataagtgcaagtattcttgatctaagagacagttttgatgatgctcttcaagtaaatactactgatctgtcaccaaaggaggccaactccaaggaaagctttgcatttaaaccagaaaatatctcagaagaaaatgcaacccacatatttattgccattaaaagtatagataaaagcaatttgacatcaaaagtatccaacattgcacaagtaactttgyttatccctcaagcaaatcctgatgacattgatcctactcctactcctactcctactcctgataaaagtcataattctggagttaatatttctacgctggtattgtctgtgattgggtctgttgkaattgktaactttattttaagtaccaccatttgaaccttaacgaagaaaaaaatcttcaagtagacctagaagagagttttaaaaaacaaaacaatgnaagtaaaggatatttctgaatcttaaaattcatcccatgtgtgatcataaactcataaaaataattntaagatgtcnggaaaaggatactttgattaaaataaaaacactcatggatatnta

SEQ ID NO: 78 - DNA, 995 bp, Homo sapiens
cggggtgcctggggcagacgaggccggcttctccgcggacagctagggagagtgtcctgggtgtcagccagaacatgtctttcaacctgcaatcatcaaagaaactgttcattttcttaggaaaatcactgtttagtcttctggaggctatgatttttgccttactcccaaagccacggaagaacgttgctggtgaaatagtcctcatcacaggtgctggaagtggactcggaaggctcttagccttgcagtttgcccggctgggatctgttcttgttctctgggatatcaataaggaggggaatgaggaaacatgtaagatggctcgggaagctggagccacaagagtgcacgcctatacctgcgattgcagccaaaaggaaggagtgtatagagtasccgaccaggttaaaaaagaagtcggcgatgtttccatcctaatcaacaatgccggaatcgtaacaggcaaaaagttccttgactgtccagatgagcttatggaaaagtcatttgatgtgaatttcaaagcacatttatggacttataaagcctttctacctgctatgattgctaatgaccatggacatttggtttgcatttcaagttcagctggattaagtggagtaaatgggctggcagattactgtgcaagtaaatttgcagcctttgggtttgctgaatctgtatttgtagaaacatttgtccaaaaacaaaaggggatcaaaaccacgattgtgtgccccttttttataaaaactggaatgtktgaaggttgtactacaggctgtccttctctgttgccaattctggaaccaaaatatgcagttgaaaaaatagtagaagctattctacaagaaaaaatgtacttgtatatgccaaagttgttatacttcatgatgtttcttaaaaggtaattacatcagcttctattacttccctaacatgccagtctacagtttactccaaatcccmccaggaaaaaccacttttaaaaa

SEQ ID NO: 79 - DNA, 1215 bp, Homo sapiens
gcaggaccgtcattgacgccatgagcgcgctgctgcggctgctgcgcacgggtgccccagccgctgcgtgcctgcggttggggaccagtgcagggaccgggtcgcgccgtgctatggccctgtaccacactgaggagcgcggccagccctgctcgcagaattaccgcctcttctttaagaatgtaactggtcactacatttccccctttcatgatattcctctgaaggtgaactctaaagaggaaaatggcattcctatgaagaaagcacgaaatgatgaatatgagaatctgtttaatatgattgtagaaatacctcggtggacaaatgctaaaatggagattgccaccaaggagccaatgaatcccattaaacaatatgtaaaggatggaaagctacgctatgtggcgaatatcttcccttacaagggttatatatggaattatggtaccctccctcagacttgggaagatccccatgaaaaagataagagcacgaactgctttggagataatgatcctattgatgtttgcgaaataggctcaaagattctttcttgtggagaagttattcatgtgaagatccttggaattttggctcttattgatgaaggtgaaacagattggaaattaattgctatcaatgcgaatgatcctgaagcctcaaagtttcatgatattgatgatgttaagaagttcaaaccgggttacctggaagctactcttaattggtttagattatataaggtaccagatggaaaaccagaaaaccagtttgcttttaatggagaattcaaaaacaaggcttttgctcttgaagttattaaatccactcatcaatgttggaaagcattgcttatgaagaagtgtaatggaggagctataaattgcacaaacgtgcagatatctgatagccctttccgttgcactcaagaggaagcaagatcattagttgaatcggtatcatcttcaccaaataaagaaagtaatgaagaagagcaagtgtggcacttccttggcaagtgattgaaacatctgaaattctgctgtcaagattcccatctctaaggactccaagtgctagagacaagggggtctatgagcatttactgacttcctgttaaaacttcattttttcaaactttttgagctatgcaatatataaataaacagtaagaattttaaattaaaaaaaaaaaaaagggcggccgctcta

SEQ ID NO: 80 - DNA, 2660 bp, Homo sapiens
gcagacttgattagcctgcctaccactgtagagggacttcagaagagtgtagcttccattggcaatactttaaacagcgtccatcttgctgtggaagcactacagaaaactgtggatgaacacaagaaaacgatggaattactgcagagtgatatgaatcagcacttcttgaaggagactcctggaagcaaccagatcattccgtcaccttcagccacatcagaacttgacaataaaacccacagtgagaatttgaaacaggatatcctgtaccttcacaactctttagaggaggtaaacagtgccctagtggggtaccagagacagaatgatcttaaactcgagggaatgaacgagacagtcagtaatcttacccagagagtcaacctgatagaaagcgatgtggttgctatgagcaaggtagaaaagaaagcaaacctgtccttcagcatgatgggtgatagatctgccactctgaaaagacagtctttggwtcaagtcaccaacagaacagatacagtaaaaatccaaagcataaagaaagaagatagttcaaattctcaggtatccaagctaagagagaaactccagctgatcagtgctcttacaaacaaacctgagagcaacmggcctccagagaccgccgatgaagagcaagtagagagtttcacatcaaagccatcagcattgccaaaattttcacagtttcttggagacccagttgagaaagctgcccaactaagacctatctccctaccaggagtttctagcactgaagatcttcaggatttattccgcaagactggccaggacgtggatgggaagctgacctaccaggaaatctggacctccctaggttctgctatgccagaaccagagagcttgagagcatttgattccgatggagatggaagatactcattcctggagctaagggtagctttaggtatctagcttcatcaggcatattttagaaatggactgcctaatatctatttacctaacaacaaaacaacccttacttacccatcagtcctctagtcctccaaactactgtagcagatactttgccaccttttaacttgtttgaagaagctatataaaagttatttttttaaagaagaagaccattttacttatgatgttcagaaatctatgatttcctacaaccagtaagatcttacattttaaaattgccagaaaaaaaattaaagccctctttttttctctttcctttttttgaggggaggagaccttatcttttaaagctgggaaatgtatatagagagagaataagccacttttatatttcacttaaatttgccttaaattagctgcactttatagagactcagaaaatgtcttttctttaaaagataggccttttctgtttgtaaatatttaaatgaaagaaagcattgtgcatattgtgtggaaagtaggaagaatggttttgaacaggatatgaacaaatgacttattaaaaattgctgatctggtgtaggtggcagctgaaactacatccatgtctccataaggyatccctcaaaggcccaggcgctgccagggggtttgtcctggtagctggaggaaccgatttcagggagtagacactggagacaatactgactccaggcatggctcatggaagtaggattctggttctttgttcctattccctcagctaatcccaacctgggaatcagagaagtcttggggatttttctcatttttagtactatttcagggtttatgagcataaaaagttatccattggggagctccattttccctgctgagtgagctagattgccttccccacccacccacttaagtctgtcttaaagccgtagctggctcccaccaccagtaccatctccatttgaatggcagggctaaattcccccagccattatctcacactgaccacccagagctttagaagagagctgtgcttctaattttgacccagaaaaccataccccttgagattttacctagaggctaaccaagagcctaatatgtttctctgggggatgactaaagccaaaaaggctgtgagatgaaacatgtgaaataatattcagtttccttaccattaccagctcagaagtagctagaggctttctacccaaaggatgccaaagtatagcagggcaggcctggagctagggccttcacatggtggtagcaagtttttcaaatctaatacaatcaagtacaatacttcctttaaatgcttctgtggacctggcatgaaagatccctagattgaaaggaataatacctccatgtctcctgtatgttgagtctagaattgctgtgttgttcttagaagcagtctttgggcaacaacttgaaaggggaaaaaaaaactacaaaaacttaactttggtataggccaagtcagggagaaagtagagaaagctgtcatgccacagacttctttagtggagatcatttcctttttaactttgttcaggttgcccttcaccatggatacagtccggtacccttaaacatttaagggctgttttttttttctttacatgatgttcagcttggtattaaccaaacttaaattttttttccagaagtattaaaatttagttaaagcaaaaaaaaaaaaaaaaaaaaaaaaaaaaaaaaagggcggccgc

SEQ ID NO: 81 - DNA, 1790 bp, Homo sapiens
ccttgccctatctgaccacactatttaatgtttttatcttaaatttaaaaaactgaaatctgaaactgtatgatagtcagtaggcctaaaactcccccttgactttgagaatttgaagggattcccttccatcctgaagtctactttcttgtcatttaagggtgagagaagggaagcttctgtgcctttctagaaattaacaaagaacctgttgggtcctagaccagaaatccagcacgttatcctagcatgaaactcccttttaaaaagtgaacacccaaagagatgttacaaatgaagatatagccccttcagcatctctggagaccaataccacaataaggaataataacaacctaggaataaaggcaggagtttttacataggatgcacgatatccaaagggactttataaacacaagccattgagtcttaagacctgacacatggcaaggrtaggacatgtgagagaaaatggatggacggttgaagaaaagaggggaaaagaccatgcagttgaactaacttctttttaatttcaaacaggtattttttgcatccgtgcgatctggaggaagtagccaagtgtttttcatgaccctcaacagaaattccatgatgaactggtaacagaagagcacttggcacttatcttcatggcgttatttctaatttaaaagaacataactcatgtggacttatgccagtctagaggcagaatcagaaggcttggttgaacatatcgctttccctttttcctctccctccgcccctcccagtacagtccatctttcaatgttgcagcctggttgagaaggagagaaaaaggtggcaggaatttccaggagatccccaagaatgctgccttgtctgtggacaaagatggaccatgtgcccttcggaattagggatagaaacaaatattgtgtgctcttaacgattaagctgtgttatggtgggttttcaggtttttaccttttttctttacccctttactctgcaagaatggggaaagaatgcatactgcgaaaatgagtcttttaaattctgtctgcctactagttttaagtatatggtatgttgtaaaatttccaatgatgagagacagcacaataaatgtaccttatctccttaggctgaaggccataactacatagtggagtaatttaagaactctcttgccttcaccaacccaaaaggttgctttttgatagcaactggctaatgaatttttaaaagagaagaaaaatactagttttcccctcttttgggaaatagattttaaatggctaaactactagccttaaaactactagtctaataaaatcaactaccacttttgtgaatctgacaggccacatttttatatggccctttacagaatggagtgtgttgaacaggatactaacgccattgagttgagctggcctagcgatggagggacactctaacacaactttccctcagctattatgcaacagatcagggaaaaagatgggatgacagatggggtcagacagaaagagcttctgggaaacaagcttacatagtcttttttaaaatgcacaaagcctcccagctaagaggtcacttggtttgggcttcattaggactgagactttgttgagttctttctgggacttggagagtggatgatattcaggctctgaacattcccagcgctctcccgagggtgccactttctcaagatgaaaactgtgactgaaaaaattaataataaatgtttctgagctgcaaaaaaaaaaaaaaaaaaaaaaaaaaaaaaaaaa

SEQ ID NO: 82 - DNA, 1350 bp, Homo sapiens
agtgggcgggccatttcttgttctctctcccgctctcggaagctttcgtctcgtgggtgcgaaaggtaaccgaagcggctcaggaaggcagctgtcactgagcccctggaacagagcgagagtatcgtaagtaaccaggctcagccggtttctcaggccgctctagtcaaataaaccataaagatcagactcgggcttcttcacttccttctctccgtggtttcgccattagcttccggttccggggaggggccgagttttcttcgaagatttggggctccgcgatacagttaggatggctgtagtacctctgctgttgttggggggtttgtggagcgctgtgggagcgtccagcctgggtgtcgttacttgcggctccgtggtgaagctactcaatacgcgccacaacgtccgactgcactcacacgacgtgcgctatgggtcaggtagtgggcagcagtcagtgacaggtgtaacctctgtggatgacagcaacagttactggaggatacgggggaagagtgccacagtgtgtgagaggggaacccccatcaagtgtggccagcccatccggctgacacatgtcaacactggccgaaacctccatagtcaccacttcacttcacctctttctggaaaccaggaagtgagtgcttttggtgaggaaggtgaaggtgattatctggatgactggacagtgctctgtaatggaccctactgggtgagagatggtgaggtgcggttcaaacactcttccactgaggtactgctgtctgtcacaggagaacaatatggtcgacctatcagtgggcaaaaagaggtgcatggcatggcccagccaagtcagaacaactactggaaagccatggaaggcatcttcatgaagcccagtgagttgttgaaggcagaagcccaccatgcagagctgtgaatctagaggctctgagccactgttaacgcacaatgttcacagacatctgttgctgcctcaccttgggatccctgccacaagttccttgggcagtggccatgtcaccattgagatgaagatatacaacagaaaatagtggctgtgtttggaagcttcagccctgcacatttgaactagtcactctcccagacttgcgtgggtcagttctttctgagtagaggacttgctggtaaaggggcagatgctttttattagtactgataaaacaaactgagggaaacatccctcttagctgggaaacttttactcttcaggagcttggcatcatggactgttaatgtatgtgattttccccctattttctctctccaaaatgataaaaacaataattttaaaaaaaaaaaaaaaaaaactcgagg

SEQ ID NO: 83 - DNA, 1746 bp, Homo sapiens
ggcatcagtaaggtctgtatttaaatgtggatgtagacatcataattaccaagacaagaaattgttttgagaaattctctgatgtttttcttcttcaggtttcacgtgccacgatcatggtgccacggtactgcagtatgcacccaaacagcaactcctaatctcggggggtaggaaaagacacgtctgcatttttgacatcargcaaaggcagctcattcacacgttccaggcccatgactcagctattaaggctctggccttggatccctatgaggaatattttaccacaggttcagcagaaggtaacataaaggtttggagattgacaggccatggcctaattcattcatttaaaagtgaacatgctaagcagtccatatttcgaaacattggggctggagtcatgcagattgacatcatccagggcaatcggctcttctcctgtggtgcagatggcacgctgaaaaccagggttttgcccaatgcttttaacatccctaacagaattcttgacattctataaagattggggttttatttttatatacatttcagttaaaaggcacactacagtcatcactaggcaattctgctttctaagcagttgtattgaaaacagagaatctctgtgtagaatttgaatatgacccaagctgagtattatctaaacaggttggtggaatgaatgcgcatgtaccttattatgctgacatactaaaaaaaataaaacctagtattgtatgaaggatagctattctttacagcatttagcaaacctgattcagaaaacatttgagattagcaaattagtaacttgaaataatgaaaaggacgtttataccaaattaaggaagaaaatgttgctgatttgggtttttcttcctgttcttaccactgactgaagcatgcctgcagtctcctcctctgttgaatgaaggataatcataaggtgtttgttaggagcgctagaccacctggaaaactttcttagctgtggagcagtgcgcagtgaccagttctctgctgtgagaggccgtttccattctttcctgctgaatatttttcctgttagtgtttatactgagctagtactgtaacttgcaaatgagtgcaaatttaaatgcaatgttttactcacaatttgcacattcacattttttggactgctagtttttctatttaaatatttgccttcatgttaggaatgtactatgtgaacatgacatatttgtagttaaccaaacacaccttcttagtccagtttagtactttttcttttcgtgtattcaaggttaaacacccaaacatttaaggatatgttgaaactacaccaatagagcatttcatatcataattaaaatgaatgttaggcttcttgtggccagttaatagttgatgagattggtgacattatttattgccacagcctattgtataaactatgcagagttaaatatttgcttgtaaaatattagccaatgttgtcattattttgatgtatttccttggttatgaccaaaaatatgttgagatactgaaactaatgtctgtgtgtttaaatgtttaccagcaaattgtcttatcatgttaatgagaatgttcaatgcctgtgtggtaaatagtaaatacaatggcataaaagtaactttctctgaagatgtgatgttcaggctgtgaaatatatatgtaaaagaaaaataaatgttatttgttagaaaaaaaaaaaaaaaaaaaaaactcgta

SEQ ID NO: 84 - DNA, 1491 bp, Homo sapiens
  misc_feature (176): n equals a,t,g, or c
  misc_feature (711): n equals a,t,g, or c
cccacgcgtccgaatcaacaaagaatctgaagtttacaagatgcttcaggagaaacaggagttgaatgaacccctgaaacagtctacctctttcctgattttgcaggaaatcctggagtctgagataaaaggggatctcaacaaccctcaggattcagaagtgttaaaactcctgnaccctraagtgrmtgcatcaattggaaatgctcagaaggtgcccatgtgtgacaaatgtggtcctggcattgtaggcatgtttgtaaagctgcggggaccatcatcccctccctgaatgttacgtgtgcactgattgtgacamtcacccgaaagagaagggctttttttttttttttccatcaaatctactgtgaagagcatgcccaggagcaagtcacaccacttgagggtacgatgtgatcatcatgttccccaagtgatccagcagacctgcactgaccaccgttctccagccagcctctgctgcagctagttctctaaatgttctggccttgtctcttgaaagttctgtacttattcccccaccccccaacccgcttaccttggttttatccctgctcattgaaccttgagtcccttgtcttggttaactgactcacactgactgtgtggtgcccgcccacttttacaatgaatggcaaactgtttttgttcagtgtccccttgccggcaacactgtgtaccttcctcccntcagttcttctctgctgcaaatggacatcagccacatttgaaccaaatcaaatataatatgtctgacattgatttcatttttgctccatctatagactcccagaaaaaaraaawaaaaaaaatgcaaagaaaatttaaatgaacaaacagacccttctggaacctactgtgacatgagatgtgtccacaaggcgaggtttcaggcacacactgaaggagcatctgctggacagccctccccgcccccaagtccttaccaacctgtgccactgcataccctgtaaaaagtgtgtggtggttggtaatggaggagttttgaagaataagacattrggrgaaaaaatcgacycctatgatgtaataataagaatgaataatggtcctgttttaggacatgaagaagaagttgggagaaggacaaccttccgacttttttatccagaatctgttttttccagatccctattcacaatgaccctaatacgacagtgattcctcactgcttttaagccacatgatttaaggtggctgttggaattgttgatgggtgacaaaataaacactaatggtttttggaagaaaccagccttaaacctgatttataaaccttatcaaatccgaatattagatcctttcattatcagaacagcagcttatgaactgcttcattttccaaaagtgtttcccaaaaatcagaaacctaaacacccaacaacaggaattattgccatttttacataacctctatgattttaataaaaaaaattatgtaaaaaaaaa

SEQ ID NO: 85 - DNA, 968 bp, Homo sapiens
ctgcagttaagtgaaaagaaaatccagcctccccctccaaaaaaaaaaaaaaaaaaaaaaatttaatttttaaaaattagtggtatggcaataagacacttcagaggctatcttaacctctgaatacccatcttctagtttaaagacagagacatcccatctggaaaatgttaacttgtgttgccatctcgttgccggagtaagtagacataagacagagtttaagaagtaaaaatatagaaaaattttgatggtcacaatgagataaatattagaatattactattccaatgattaaatgaggatcttgaaataaattctgaagtcttccaatttttacatttattggaggggtccctgagttctgtcaacttttttatttaagtctcttgctcttattttgtgcataaatgttaaaccttccaaaaatgaaatgttagctttctttcttttactttttattaaatttaatagaaaatatgacctgagtagttaaaaagtattttgcattatttgcagtaagatgtctctagcactgctcaaagggcaaattttaaaacttcagtctgggtgaaagatttgctagttttacagaaagatttgctatcttaaactcaagctggtttttctgttctcatgtaagtgactgggatgctgtcttatgaattcttccaaggtcatgtttgtgaaataaacattacatgagagctttcctgtcatctacactatatgttgtctggagtgttgaacaaatttattttagtttctaagttgtaatctatcctcatatggtctatacgattttgaatgtgtgccactacatactgagatgataatgctgtacaattttaagtggtagcagtttctgtatgcagtaggctgaaatattttgatgaactgcttaatttttggattttattttttaagttgtataatttattttcttgcaaaataaaaatgtaatataa

SEQ ID NO: 86 - DNA, 3068 bp, Homo sapiens
cgacagaaggggaggttgtttttataagaggcgtcattggcgcccgagctgtgaccgccgccactggggcagccagcacaatcgggcggaggtggcgctgccccttcagacctgaaagatgtctgaaaattccagtgacagtgattcatcttgtggttggactgtcatcagtcatgaggggtcagatatagaaatgttgaattctgtgacccccactgacagctgtgagcccgccccagaatgttcatctttagagcaagaggagcttcaagcattgcagatagagcaaggagaaagcagccaaaatggcacagtgcttatggaagaaactgcttatccagctttggaggaaaccagctcaacaattgaggcagaggaacaaaagatacccgaagacagtatctatattggaactgccagtgatgattctgatattgttacccttgagccacctaagttagaagaaattggaaatcaagaagttgtcattgttgaagaagcacagagttcagaagactttaacatgggctcttcctctagcagccagtatactttctgtcagccagaaactgtattttcatctcagcctagtgacgatgaatcaagtagtgatgaaaccagtaatcagcccagtcctgcctttagacgacgccgtgctaggaagaagaccgtttctgcttcagaatctgaagaccggctagttgctgaacaagaaactgaaccttctaaggagttgagtaaacgtcagttcagtagtggtctcaataagtgtgttatacttgctttggtgattgcaatcagcatgggatttggccatttctatggcacaattcagattcagaagcgtcaacagttagtcagaaagatacatgaagatgaattgaatgatatgaaggattatctttcccagtgtcaacaggaacaagaatcttttatagattataagtcattgaaagaaaatcttgcaaggtgttggacacttactgaagcagagaagatgtcctttgaaactcagaaaacgaaccttgctacagaaaatcagtatttaagagtatccytggagaaggaagaaaaagccttatcctcattacaggaagagttaaacaaactaagagaacagattagaatattggaagataaagggacaagtactgaattagttaaagaaaatcagaaacttaagcagcatttggaagaggaaaagcagaaaaaacacagctttcttagtcaaagggagactctgttgacagaagcaaagatgctaaagagagaactggagagagaacgactagtaactacggctttaaggggggaactccagcagttaagtggtagtcagttacatggcaagtcagattctcccaatgtatatactgaaaaaaaggaaatagcaatcttacgggaaagactcactgagctggaacggaagctaaccttcgaacagcagcgttctgatttgtgggaaagattgtatgttgaggcaaaagatcaaaatggaaaacaaggaacagatggaaaaaagaaagggggcagaggaagccacagggctaaaaataagtcaaaggaaacatttttgggttcagttaaggaaacatttgatgccatgaagaattctaccaaggagtttgtaaggcatcataaagagaaaattaagcaggctaaagaagctgtgaaggaaaatctgaaaaaattctcagattcagttaaatccactttcagacactttaaagataccaccaagaatatctttgatgaaaagggtaataaaagatttggtgctacaaaagaagcagctgaaaaaccaagaacagtttttagtgactatttacatccacagtataaggcacctacagaaaaccatcataatagaggccctactatgcmaaatgatggaaggaaagaaaagccagttcactttaaagaattcagaaaaaatacaaattcaaagaaatgcagtcctgggcatgattgtagagaaaattctcattctttcagaaaggcttgttctggtgtatttgattgtgctcaacaagagtccatgagcctttttaacacagtggtgaatcctataaggatggatgaatttagacagataattcaaaggtacatgttaaaagaactggatactttttgtcactggaacgaacttgatcagttcatcaataagtttttcctaaacggtgtctttatacatgatcagaagctcttcactgactttgttaatgatgttaaagattatcttagaaacatgaaggaatatgaagtagataatgatggagtatttgagaagttggatgaatatatatatagacacttctttggtcacactttttcccctccatatggacccaggtcggtttacataaaaccgtgtcattacagtagtttgtaacatttgtagattggatagcatttttatgatttgatgagtttcttgtaaggttaccgtttctaagagttgtgctttatggccactgagagaattcagaataaattgaaagatggagtctaaaaattattagctgttacaaatggaacatttcattataacgtgatcactttgacttgagcaaatggtttaatttttatcttaaaaatcagttaagaatatataaaatcctactttggccaagtttgtttcttttcattatagtttatatgaaaagatcaccttaagtgaaattattttcctttaatcttttatgtatttattcacttttggaagctaggaatgagcaacacaaattttactctgaagtcagaagagctcatatataataattctaatgtcccacctattttcacttgtccattccatgtaccagcttagttatgatacttagtcacataattatctttgataaaggtagaggcacaaagaggcaaactaagcaagtcaaattctaatgtgtgtacttcataataattttttatccattttcatctttatattctgtaacatgaaacttacctaatcttcaaatgttagcttcattttttacctttgaaatacttaatctttctgaataaatataatgtgtctataaaataaaaaaaaaaaaaaaaaa

SEQ ID NO: 87 - DNA, 2230 bp, Homo sapiens
  misc_feature (2227): n equals a,t,g, or c
ggcacagccgtgctccgggtaagatggcagcggacggacagtgctcgctccccgcttcatggcggccggtgaccctcacccacgtcgaatatcctgcaggtgatctctcyggccacctccttgcctacctgagcctcagccctgtatttgtcatcgtcggtttcgtgaccctcatcatatttaagcgggagtgcacacgatctccttccttgggggcctggcactgaacgagggggtcaactggctgatcaaaaacgtcatccaggagccacggccctgtggaggcccccacacagcagtgggcaccaagtacgggatgccctccagccattcccagtttatgtggttcttctccgtctattccttccttttcctgtatttaagaatgcaccaaacaaacaacgccaggttcctggacttgctgtggaggcacgtgctctccctgggactcctcgctgtggccttcctagtctcctacagcagggtctacctgctgtaccacacctggagccaggtgctctatggaggcatcgctggaggcctcatggccatcgcctggttcatcttcacccaggaggtcctcaccccgctgttccccaggatagcagcctggcctgtctccgagttcttcctaatccgagacacaagcctcattcccaacgtactctggtttgagtacacggtaacccgggcagaagccaggmacagacaacgcaagctggggacgaaactgcagtgaccagtgggtgtggctgggtccagcctccagatctggcccgcacgatgccttgcaggatggacaggatgacagacagggacgaagcagagacctctacagacccaagtcaccaagtggagcctttttttttcttattttaattttaatgaacaaggtggaccaaagggctgaaccagcccctcaaccaggaccctggggggcctgctgcctgggggccgtggccagagaccctcgctgtgctgctgccagcccctggctggggcagaaagtgccctcggcatgggcacctgggtgtggggtggaggaggagggctcgcgcctctggtctcggggccaggaattccaggtggcgtgagaagtacacactatttattttttggttttktcagaggcaggcaggattttggagctggaagaatctgctctccggtggctgccctgtgaacagagggctcccggtcagcttcccaggcccttcgccctatgcccagaggcagactgcctctccctgggccggggtggcctgggtgccaggaggaggggagcataccccacaccctccctgccaccgttgccgttccagaacctcggtcagtgtttccctgtctgggggcagggcccagagcgagcacgcgtctggcggctgctgtcgttgtgttctaccccgtactgacccaacaccacaagggctttctctggtcccctgtccctaagacaataatcgctttctgacaaaggagcctgcacatttgggtgagcagacccaagctgtttacagctctttcttgtcctgccatccagtagcagttagtcttcatccccacgtgaacaaaatgggaaggagccgtgaggagaggagtgaggcaacaggcacccgaagtccctcgtccttccctctgtgtgctctgaatatgtccttgtccttcctgacccatctctgaccagctgggaacctgcttggggtccccctcaaacctgtgtctggggtgtgggctcacagatccctatcagcctggttcgtgggagggctcttcctaaagggacccccatctctaagtcactctgaaagggagttgtggagaggagacgcctccagactctcagaagttttgaggactgaactgggtcactcgggatctgtgttcgaatcctccccacccctttctttgtggagtttcctaacctgctgctgaagcacaatgttttggtgctttcttttctcatttgttaaaggcagtgtccaaaagccattccagatgccaagaccaggggcttatttctagggaaggtaggtcggtttccatgtttccctcccgttatttttattttttactttttgcctgagacaagccgagtatgaggtggtttgatttaagaaaaatcaatgaaattgtttactactgttttaaaataaaaccgtaaactctgaaaaaaaaaaaaaaaaaaaaaaaaaaaactcgagggggggcccggtacccaatcgcatcncat

SEQ ID NO: 88 - DNA, 1163 bp, Homo sapiens
  misc_feature (159): n equals a,t,g, or c
actgccccaagctcaaggagatcaatttccgtgggaacaagctgagggacaagcgcctggagaagatggtcagcggctgccagaccagatccatcctggagtacctgcgcgtcggaggccgtggtggcgggaaagggcaagggccgtgcgagggctcgnagaaggaagagagccggagaagaggagggagaggaagcagaggcgggaaggtggtgatggggargagcaggacgtgggagatgccggccggctgctgctcagggtcctgcacgtctctgaaaaccccgtacctctgacagtcagagtgagccccgaggtccgggatgtgcggccctacattgtgggggccgtggtgcgaggcatggacctgcagccagggaatgcactcaagcgcttcctcacctcgcagaccaagctccacgaagatctctgtgagaagaggacggctgccacccttgccacccacgagctccgtgccgtcaaagggcccctgctgtactgcgcccggcccccacaggacctcaagattgtccccttggggcggaaagaagccaaggccaaggagctggtgcggcagctgcagctggaggccgaggagcagaggaagcagaagaagcggcagagtgtgtcgggcctgcacagataccttcacttgctggatggaaatgaaaattacccgtgtcttgtggatgcagacggtgatgtgatttccttcccaccaataaccaacagtgagaagacaaaggttaagaaaacgacttctgatttgtttttggaagtaacaagtgccaccagtctgcagatttgcaaggatgtcatggatgccctcattctgaaaatggcagaaatgaaaaagtacactttagaaaataaagaggaaggatcactctcagatactgaagccgatgcagtctctggacaacttccagatcccacaacgaatcccagtgctggaaaggacgggccctcccttctggtggtggagcaggtccgggtggtggatctggaagggagcctgaaggtggtgtacccgtccaaggccgacctggccactgcccctccccacgtgactgtcgtgcsctgacsccagggccgcctgtccgcgtttgtttggccggttttgcggaggtttctatgcggcaatgctgaattatccgttagat

SEQ ID NO: 89 - DNA, 1939 bp, Homo sapiens
  misc_feature (20): n equals a,t,g, or c
  misc_feature (31): n equals a,t,g, or c
  misc_feature (33): n equals a,t,g, or c
  misc_feature (1609): n equals a,t,g, or c
agcaacctatagatcatganaggcaacggtnanctgacagtaccggtcggaattcccgggtcgacccacgcgtccrgcggtaaccgccacagctgccagcgacaggatggagagcgactcagactcagacaagagtagcgacaacagtggcctgaagaggaagacgcctgcgctaaagatgtcggtctcgaaacgagcccgaaaggcctccagcgacctggatcaggccagcgtgtccccatccgaagaggagaactcggaaagctcatctgagtcggagaagaccagcgaccaggacttcacacctgagaagaaagcagcggtccgggcgccacggaggggccctctggggggacggaaaaaaaagaaggcgccgtcagcctccgactccgactccaaggccgattcggacggggccaagcctgagccggtggccatggcgcggtcggcgtcctcctcctcctcttcctcctcctcctccgactccgatgtgtctgtgaagaagcctccgaggggcaggaagccagcggagaagcctctcccgaagccgcgagggcggaaaccgaagcctgaacggcctccgtccagctccagcagtgacagtgacagcgacgaggtggaccgcatcagtgagtggaagcggcgggacgaggcgcggaggcgcgagctggaggcccggcggcggcgagagcaggaggaggagctgcggcgcctgcgggagcaggagaaggaggagaaggagcggaggcgcgagcgggccgaccgcggggaggctgagcggggcagcggcggcagcagcggggacgagctcagggaggacgatgagcccgtcaagaagcggggacgcaagggccggggccggggtcccccgtcctcctctgactccgagcccgaggccgagctggagagagaggccaagaaatcagcgaagaagccgcagtcctcaagcacagagcccgccaggaaacctggccagaaggagaagagagtgcggcccgaggagaagcaacaagccaagcccgtgaaggtggagcggacccggaagcggtccgagggcttctcgatggacaggaaggtagagaagaagaaagagccctccgtggaggagaagctgcagaagctgcacagtgagatcaagtttgccctaaaggtcgacagcccggacgtgaagaggtgcctgaatgccctagaggagctgggaaccctgcaggtgacctctcagatcctccagaagaacacagacgtggtggccaccttgaagaagattcgccgttacaaagcgaacaaggacgtaatggagaaggcagcagaagtctatacccggctcaagtcgcgggtcctcggcccaaagatcgaggcggtgcagaaagtgaacaaggctgggatggagaaggagaaggccgaggagaagctggccggggargagctggccggggaggargccccccaggagaaaggcggargacaagcccagcaccgatctctcagccccagtgaatggcgaggccacatcacagaagggggagagcgcagaggacaaggagcacgaggagggtcgggactcggaggaggggccaaggtgtggctcctctgaagacctgcacgacancgtacgggagggtcccgacctggacaggcctgggagcgaccggcaggagcgcgagagggcacggggggactcggaggccctggacgaggagagctgagccgcgggcagccaggcccagcccccgcccgagctcaggctgcccctctccttccccggctcgcaggagagcagagcagagaactgtggggaacgctgtgctgtttgtatttgttcccttgggtttttttttcctgcctaatttctgtgatttccaaccaacatgaaatgactataaayggttttttaatgaaaaaaaaaaaaaaaaagggcggccgctctagaggatccctc

SEQ ID NO: 90 - DNA, 2032 bp, Homo sapiens
ggcacaggcggccgcccgcgcgccaagttcctcagcccttggctcctgcccagtgtttagggtgttggcggagaaaaggggaagagtcatcgcctgtcggggctaggatatgatgggtgagaggtgtcaaaccaaattctctcggtttggaaacggagaaaatctaaaaatgaggatgtgaggaaagagtccgctctcaaggcgcgttgtggtctatccgagccccgtcccctgggctccctcgggctggggtgaggcgggcagctacgcgtggggtaggaccatcttacgctgggaccccgccaaggagccccaggaagtaggtgaaagggcaggggcgtggctctcggggcgccacccacgctcttgaaatctgggtgattgcgagcggccgctcagcgtcccccacaccacagacccgcgccgccgacgacccagcagccgccatggctctgctccgaggtgtgtttgtagttgctgctaagcgaacgccctttggagcttacggaggccttctgaaagacttcactgctactgacttgtctgaatttgctgccaaggctgccttgtctgctggcaaagtctcacctgaaacagttgacagtgtgattatgggcaatgtcctgcagagttcttcagatgctatatatttggcaaggcatgttggtttgcgtgtgggaatcccaaaggagaccccagctctcacgattaataggctctgtggttctggttttcagtccattgtgaatggatgtcaggaaatttgtgttaaagaagctgaagttgttttatgtggaggaaccgaaagcatgagccaagctccctactgtgtcagaaatgtgcgttttggaaccaagcttggatcagatatcaagctggaagattctttatgggtatcattaacagatcagcatgtccagctccccatggcaatgactgcagagaatcttgctgtaaaacacaaaataagcagagaagaatgtgacaaatatgccctgcagtcacagcagagatggaaagctgctaatgatgctggctactttaatgatgaaatggcaccaattgaagtgaagacaaagaaaggaaaacagacaatgcaggtagacgagcatgctcggccccaaaccaccctggaacagttacagaaacttcctccagtattcaagaaagatggaactgttactgcagggaatgcatcgggtgtagctgatggtgctggagctgttatcatagctagtgaagatgctgttaagaaacataacttcacaccactggcaagaattgtgggctactttgtatctggatgtgatccctctatcatgggtattggtcctgtccctgctatcagtggggcactgaagaaagcaggactgagtcttaaggacatggatttggtagaggtgaatgaagcttttgctccccagtacttggctgttgagaggagtttggatcttgacataagtaaaaccaatgtgaatggaggagccattgctttgggtcacccactgggaggatctggatcaagaattactgcacacctggttcacgaattaaggcgtcgaggtggaaaatatgccgttggatcagcttgcattggaggtggccaaggtattgctgtcatcattcagagcacagcctgaagagaccagtgagctcactgtgacccatccttactctacttggccaggccacagtaaaacaagtgaccttcagagcagctgccacaactggccatgccctgccattgaaacagtgattaagtttgatcaagccatggtgacacaaaaatgcattgatcatgaataggagcccatgctagaagtacattctctcagatttgaaccagtgaaatatgatgtatttctgagctaaaactcaactatagaagacattaaaagaaatcgtattcttgccaagtaaccaccacttctgccttagataatatgattataaggaaatcaaataaatgttgccttaacttcaaaaaaaaaaaaaaaaaaaaaaaaaaaaaaaaaaaaaaaagggggagggg

SEQ ID NO: 91 - DNA, 1788 bp, Homo sapiens
ttcccaccggcttccccagaggtggaagaaacccgaracgttccgaagtcaacgcaagcaaaggggagtgcgggtcggggaggaatattcttttggaaacgtaatattggccttggggctctccagccctttgggacttccaatgggatcttagaagcagccgaagcagcgtgagggcggcagccagggccagccacgatttgaacgctctgccttgcagctcttctggaccgaggagcccaaagccctaccctcaccattcaccaggttacagttcttatccgcgtgaatacacatggctctgttacgaaaaattaatcaggtgctgctgttccttctgatcgtgaccctctgtgtgattctgtataagaaagttcataaggggactgtgcccaagaatgacgcagatgatgaatccgagactcctgaagaactggaagaagagattcctgtggtgatttgtgctgcagcagggaggatgggtgccactatggctgccatcaatagcatctacagcaacactgacgccaacatcttgttctatgtagtgggactccggaatactctgactcgaatacgaaaatggattgaacattccaaactgagagaaataaactttaaaatcgtggaattcaacccgatggtcctcaaagggaagatcagaccagactcatcgaggcctgaattgctccagcctctgaactttgttcgattttatctccctctacttatccaccaacacgaagaaagtcatctatttggacgatgatgtaattgtacaaggtgatatccaagaactgtatgacaccaccttggccctgggccacgcggcggctttctcagatgactgcgatttgccctctgctcaggacataaacagactcgtgggacttcagaacacatatatgggctatctggactaccggaagaaggccatcaaggaccttggcatcagccccagcacctgctctttcaatcctggtgtgattgttgccaacatgacagaatggaagcaccagcgcatcaccaagcaattggagaaatggatgcaaaagaatgtggaggaaaacctctatagcagctccctgggaggaggggtggccacctccccartgctgattgtgtttcatgggaaatattccacaattaaccccctgtggcacataaggcacctgggctggaatccagatgccagatattcggagcattttctgcaggaagctaaattactccactggaatggaagacataaaccttgggacttccctagtgttcacaacgacttatgggaaagctggtttgttcctgaccctgcagggatatttaaactcaatcaccatagctgatataactctacccttaaaatattccctgtatagaaatgtggaattgtccctttgtagccaactataacattgttctttatgaatattacctttgatacatatgatccacaatataaaaaccaaaaactactgtgtgcaaattataccttggaccatataggcattgattaacttctttaagtacatgtgataactatggaaatcaagattatgtgactgaaaaacataaaggaagagacccatctagataacagcaatcaacctgcttaattctgaatgacaattatatccacaaatttttaaaacttctacatgtatttttcacatgaagatctccttaacaggttgccaaccttttcttttataaaactattacatttaaaatatggacgtctgaaaaataaaatattcatcatttttaaaaaaaaaaaaaaaaaaaaaa

SEQ ID NO: 92 - DNA, 495 bp, Homo sapiens
  misc_feature (402): n equals a,t,g, or c
gggtcgacccacgcgtccgaccacattcctcctctaaagaagcccctgggagcacagctcatcaccatggactggacctggaggttcctctttgtggtggcagcagctacaggtgtccagtcccaggtgcagctggtgcagtctggggctgaggtgaagaagcctgggtcctcggtgaaggtctcctgcaaggcttctggaggcaccttcagcagctatgctatcagctgggtgcgacaggcccctggacaagggcttgagtggatgggagggatcatccctatctttggtacagcaaactacgcacagaagttccagggcagagtcacgattaccgcggacgaatccacgagcacagcctacatggagctgagcagcctgagatctgaggacacggccatntattactgtgcgaraagkccctmagcgggttatctatcccaactactaccacggtatggacgtctggggccaagggaccacggtcaccgtctc

SEQ ID NO: 93 - DNA, 1377 bp, Homo sapiens
  misc_feature (1367): n equals a,t,g, or c
  misc_feature (1371): n equals a,t,g, or c
  misc_feature (1376): n equals a,t,g, or c
ggacccacgcgtccgagacttttgaaggaagaaatcaattatgatgataaactacaggtaagagttgggtgttctaggtcctgttcttcaggctttttatattcagaaatatgatacatgtataacagcttaggcagtcattgcctagttggtcacattagggtgacaaccaaagattaacaccaacatgtatttaattgtatgatttatagtgtcccttttggcttaacactttcaaacatttttcttatatttggctttcctagttccctattatttttttaaatctggaagttgtcattttttaattaatttctgtcgaactgaagtgattagaaatatcaacatctctttcaggttaaaaatattttgtatcatgcagtcaaagaaatggtgagagccttgaagatacacgaggatgaagtagasgatatggaagaaaattaagtgtgatccagtttgatatttttaggttgttgaactgggattacttaaccttgaatgatgatatgtatgcacactgactttaagcttcataaaaccatcagtgccaagaaattctctttgtagtaattacttgttactgacaccacagcagtatagcatatgtcacagctcctgtgattcaatgttataaaacaagcagaattttaaaagcagcactatatagctgttttgtattatagtgtatatgatgtttgtgaaaatgccagatttaaaatgatgtatttatttttggtaaaaaataaaaaattctatgctatattgttgatcaagtgtaaatgtgaccttgtacagtttactaaaattactgatatttttcactacattgagacagttactgtgagaataggacacaaacaccagctattgcctgcatctgggaaattgctgaatcgcacagcagtcatgtcataatcagaaaattactgccaaataattgtaaaatttgtaaagtataaagtatataaagtagatactaaatacagacacttcaatattttgttgaagctattgactgtacaattaaacattttcaaaaggtgtaatttatttaaaattgtctcattttggtaaaatttatgtgaacttttaaagctaaatattaaacttaatatgctatgtaaatatatacatatatacatttaatgatgtatttttttaaaacattggcttgcttttgttaaagtgcaagtgttacatatggctttgtacattaaagttgaaaggggttttacattttccattaaaaggactttatcaaaaaaaaaaaaaaaaaaaaaamamaaaaaaaaaaaaaaaaaaaaaaaaaaaaaaaaaaaaaaaaaaaaaaaaaaaaaaaaaaaaaaaaaaaaaaaaaaaggggnggcnttttna

SEQ ID NO: 94 - DNA, 2819 bp, Homo sapiens
  misc_feature (82): n equals a,t,g, or c
  misc_feature (83): n equals a,t,g, or c
  misc_feature (84): n equals a,t,g, or c
  misc_feature (2816): n equals a,t,g, or c
  misc_feature (2817): n equals a,t,g, or c
  misc_feature (2818): n equals a,t,g, or c
ttttgtatttttttttagtagagacagggtttcactgtgtcagccaggatggtcttgatctctggcccaagcttttaaaacnnnaaaacggtggccaggcacggcagcacacacttgtaattctagcacttcaggaggccgagatagaaggatcactcgagcccaggaattcgagaccagccctgacgatataaatagggaaagagagagagagagagagagagcgcgtgcacgcgagggagaatgcctgcccctctccagcctggccaacagaaggagatcctgtctcaaagaaagtgaaaatgcttcagctagaattataggataatcctgkgtgagataatttacatagygactggaagagttattaaatattgctttcttgytgctaagttctgtagttgggttagatatctaatgcgtaactattgtgaaagtcaagagattctaatttttccagaaaataatgttgagtttccatgaagaacaggaagtactgccagaaactttccttgctaatttcccttctctgataaagatggacattcacaaaaaagtaactgacccaagtgtggccaaaagcatgatggcttgcctcctgtcttcactgaaggctaatggctcccggggagctttctgtgaagtgagaccagatgataaaagaattctggaattttacagcaagttaggatgttttgaaattgcaaaaatggaaggatttccaaaggatgtggttatacttggtcggagcctgtgacatttgttgacactgtgaactgtccaaaagtctcttaactgcaccttgtgaatggtagttgaggtcttcatacagttcagcctctagaatggtaacaaatcagccaattggattcgaaacaaagaagactatgtaaaactcacccatcacactttgagactactcactggttggaagaatatagtattgcagcaaatcctgtatgaaagagagatgtgggcttcctttttgagtcttgtgttaggtgctgagaccttttacatgggcttatacagggagagagtcttcaataaatgtagtcagcactattttctgcatccagtgtggttgcgtttctcacctgagagtaatcaagataacatctgtcatcttccttggtttattgagtgaaatgcctctcagtcttaggggacatggcagagatgaaagaaagaaagagtgggtttcagaagtgtcagggtggagtgattccaagtgggatggttgtggcattagtttaagctgaataaataatttcaatttggggcagttattctgctttttgtaaagccgtggccaattgtctcctgtaatgactgttggttcaggcatgttgtactttgtagggacaaatgtgcatttgtttgtggcaaaagcctacaattgacaaacttgtaaatttctttgtatataaactagctgtaacctgactatcctttgtgtttactgtttttgtaaatttttttcctctataaatgaaagggtgttggttcagaatggcactttgaataatgtaaaccagtgaaaagtggattttctttacttttgtctttgggtttggggttgtttttgttctttttgaagttttattatttttaaagtgcctcccacctaggcgtaggccatgaccatttggggtacgagagcctaattttgtaggacttaatctgttgaaaagtgcagttacttctggaaattaacctcaatattaggtcagcatgtgaaatgttggatttgacatgtcaggtagggttcagggactgattggtcccatttgccctcaggtcagttgtttaatctcaagacctgttactactgattttattaaatcagagtctttaattcttgcatgtttgtatctaatttctgaacgaatgagcacactttaaccagttatttacagttacctttttcctttaaccggattgtgaaagcttcatgtattttaatttagattctgtgtttttaagggttctgagcatgaagctggcagatagtcggcaggactcattttttcatcatggctggctgatttctccatagattgataacagtattttgttatcttgcttctctgtagttttgcatcagctgtttaactttgagctgagtgaggggagaggggtaaagagaaagaaacttaagttttctttcacagaactccaccattgtgggctttgagagagccctaaagcattgtacctagtggtacctagtgacttccaaccaaagcctttgagtatgcactaaataggtgagaagaaaggagagaaggtttttaggttagaaacctttaaccgatagaaggatatggtatgttgtaaagctggaaccaagtttgcatttttgagggcttgagatgaagggaagactcttaccagatagtaagacagctgagttttcctcagttttctcgtcttaacactagtggacaattctagcattttgtttggaggatttcagagttaacctcatggaattcaggattttttagcaagtttgcttttggttttatcttggcttttagtaatcatgttggctggtctggtcacaggtgactgtgaaacagatgccctggtcttgctttcatcactctaggatcatgaagtgctatgctatttcctggttatgaatattaaggttggaattacatttttattgattgtttggatcagagctcagttcctgtagaaaacgaactgtaaaagaccatgcaagaggcaaaataaaacttgaagtgaatgcttaaaaaaaaaaaaaaaaaaaaaaaaaaaaaaaaaaaaaaaaaaaaaaaaaaaannna

SEQ ID NO: 95 - DNA, 705 bp, Homo sapiens
  misc_feature (488): n equals a,t,g, or c
  misc_feature (682): n equals a,t,g, or c
  misc_feature (684): n equals a,t,g, or c
  misc_feature (687): n equals a,t,g, or c
gcggcctggctaactcctgccaggcagtgcccttcccggagcgtgccctcgccgctggtacggctcctacctggtctggaaagagctgggaggcttcacagagaaggctgtggttcccctgggcctctacactgggcagctggccctgaactgggcatggccccccatcttctttggtgcccgacaaatgggctgggccttggtggatctcctgctggtcagtggggcggcggcagcactaccgtggcctggtaccaggtgagcccgctggccgcccgcctgctctacccctacctggcctggctggccttcgcgaccacactcaactactgcgtatggcgggacaaccatggctggcgtgggggacggcggctgccagagtgagtgcccggcccaccagggactgcagctgcaccagcaggtgccatcacgcttgtgatgtggtggccgtcacgctttcatgaccactgggcctgctagtctgtcanggccttggcccaggggtcagcagagcttcagaggtggccccacctgagcccccacccgggagcagtgtcctgtgctttctgcatgcttagagcatgttcttggaacatggaattttataagctgaataaagtttttgacttcctttaaaaaaaaaaaaaaaaaaggggggcccgtaaccaattggccctaaagngngtngtttaaaattaatggccg

SEQ ID NO: 96 - DNA, 3472 bp, Homo sapiens
  misc_feature (55): n equals a,t,g, or c
  misc_feature (69): n equals a,t,g, or c
  misc_feature (3457): n equals a,t,g, or c
  misc_feature (3466): n equals a,t,g, or c
  misc_feature (3470): n equals a,t,g, or c
attaaagccagaaccagatgatctcattgacgaagacctcaactttgtgcagganaatcccttatctcngaaaaaacctacagtgacacttacatatggttcttctcgcccttctattgaaatttatcgaccacctgcaagtagaaatgcagatagtggtgttcatttaaacaggttgcaatttcaacagcagcagaatagtattcatgctgccaagcagcttgatatgcagagtagttgggtatatgaaacaggacgtttgtgtgaaccagaggtgcttaacagcttagaagaaacgtatagtccgttctttagaaacaactcggagaaaatgagtatggaggatgaaaactttcggaagagaaagttgcctgtggtaagttcagttgttaaagtaaaaaaattcaatcatgatggagaagaggaggaagaagatgatgattacgggtctcgaacaggaagcatctccagcagtgtgtctgtgcctgcaaagcctgaaaggagaccttctcttccaccttctaaacaagctaacaagaatctgattttgaaggctatatctgaagctcaagaatccgtaacaaaaacaactaactactctacagttccacagaaacagacacttccagttgctcccagaactcgaacttctcaagaagaattgctagcagaagtggtccagggacaaagtaggacccccagaataagtccccccattaaagaagaggaaacaaaaggagattctgtagaaaaaaatcaaggaactcaacagaggcaattattatcccgactgcaaatcgacccagtaatggcagaaactctgcagatgagtcaagattactatgacatggaatccatggtccatgcagacacaagatcatttattctgaagaagccaaagctgtctgaggaagtagtagtggcaccaaaccaagagtcggggatgaagactgcagattcccttcgggtactttcaggacaccttatgcagacacgagatcttgtacaaccagataaacctgcaagtcccaagtttatagtgacgctggatggtgtccccagccccccaggatacatgtcagatcaagaggaggacatgtgctttgaaggaatgaaacccgtaaaccaaactgcagcctcaaacaagggactcagaggtctcctccacccacagcagttgcacttgctgagcaggcagcttgaggacccaaatggtagcttttctaacgctgagatgagtgaactgagtgtggcacagaaaccagaaaaacttttggagcgctgcaagtactggcctgcttgtaaaaatggggatgagtgtgcctaccatcaccccatctcaccctgcaaagccttccccaattgtaaatttgctgaaaaatgtttgtttgttcacccaaattgtaaatatgatgcaaagtgtactaaaccagattgtcccttcactcatgtgagtagaagaattccagtactgtctccaaaaccagttgcaccaccagcaccaccttccagtagtcagctctgccgttacttccctgcttgtaagaagatggaatgtcccttctatcatccaaaacattgtaggtttaacactcaatgtacaagaccggactgcacattctaccatcccaccattaatgtcccaccacgacatgccttgaaatggattcgacctcaaaccagcgaatagcacccagtcctgcctggcagaagatcatgcagtttggaagttttcatgtactgatgaaagatactctacagaacttgtcaaatctttgaaacttggaatatattgctttcataatatgaagttttattgcctatctatctgaagtgtctaatttttcaagtttgtaagtttattatgtggttttaacattgggtgtttttgttttgtttttactatgaaaagacagcttaaggaagagctaaattctgttaaaatatttggggcatgtttgtgcactgctgttgtgaggatcagcatatgaaattgacatcatggttagtcatggtactgcagcttagggggctacacggttgctgtgtgagtggagagatgcagtgaggcagttgtcattattctaaaaattgtactactttcacttttcccaaagattatataatgttcataatccaccatgaaaacagcattggccaaaggtactgaggctgcttaaaatattcaattctgctttttaatttttaagtgaatttagtttgaaaagcatgattatacaggcctctcaggctgagtgctactttggtaaagttcccagttttcctgccttctgtgacaggatgaatgaggtgggtatggacagtggaggcagctggaatggcaagtgcagaaaataggaacagttctatacagtgctctcatttactaataacataatgccttctaaataatttttttgggaaactacattatcacaaaattatacaaatttttttacaagtatttacatactgtatctgaaaacagactttaaagtcacaagattataaatgtacatatgtattctcacattctgaaaaataacattctcagaatccacagaaaatatacttagttactactgaagataatttttgaaatgtaaaaattagatttaaatagtatattttaaatgacagaactataattacagagatcagatcagataggtaaactgcaagatagataggatgaaacttttggcctactgtattacttacagagtttttttgtgtgtggtttttaaaactgttaaggcaagaagtgtcaaatgctttagagttaaataacagatcactgatttcaaagacttggtgtatagtgttaaaaattaaagcttaaaaggtggttagaaaagtggattaatgcaaaaggggtaataaagactgcaacattctcaggaccaaattaaactgctaaaaaaaaaaaaaaagttcattgacttgcttagtcgtatactcaaatgatgataaacctacatgtgcaaaggctcacgtttaagattgtcaagccagcagtctactgttgtgttgccattgcttttccattgggagaagaaagaattaaccagtcattaaaccatttggtaagttgcactttgctgtgctgatcccacaggaaaggcttgaaacacgagaagcagcaaagacagagcacacaagtgcataaggctgttgtcttcggcttgggtgaaatgacagttcctcttcattctaaaggtttactccattgaatttaaggcatttgttcattccagtgttgagatgctttgcatctctgcagaagaaatttattttaaattgtttaaatatctggaaatacttttagctatcatttataaagatagttttgttctcagtttcactataaattatagaacaaatgggaaacaagggtttaatttagttcagccattttacaaggaaataataaaatactaaaatctggaktgttcmnttacctttncccncc

SEQ ID NO: 97 - DNA, 1216 bp, Homo sapiens
ggagcgtgacttcatctcaaaaaaaaaaaaaaaaaaattattctgtaccatcacarcttttcacaacgatggcaagccttatgtcttgggagcctgttttgctaggcaaagttacaagtgacctaatgggagctcaaatgtgtgtgtgtctctctgtgtgtttgtgtgtgtgtgtgcactcaagacctctaacagcctcgaagcctggggtggcatcccggccttgccattagcatgcctcatgcatcatcagatgacaaggacaaccctcatgacgaagcaacatgaattagggggcctcttggccttggtccaaaattgtcaatcagaaatgaacataaaggactccagagcagtgggactgtctgtcaaaagactctgtatatcttttgtggatgagttttgtgagagaacagagagaccattgtacctggcacaagggctsttcatgaaaagggagacttactgggaggtgcaagacagtggcatttctcctctcctcttgctgctcagcacagccctggattgcagccccgaggctgagaccagacaaagcccgggaggcagaaagatgctccaagaaccaacactatcaatgtctttgcaaatcctcacaggattcctgtgggtccagctttggaactgggaaacctttcttcggatccgcactcattccactgatgccagctgcccctgaaggatgccagtactgtggtgtgtgagtctcagcagccgcccacacgctcctaactctgctgcatggcagatgcctaggtggaaatagcaaaaacaaggcccaggctggggccagggccagaggggaaggccctggattctcactcatgtgagatcttgaatctctttctttgttctgtttgtttagttagtatcatctggtaaaatagttaaaaaacaacaaaaaactctgtatctgtttctagcatgtgctgcattgactctattaatcacatttcaaattcaccctacattcctctcctcttcactagcctctctgaaggtgtcctggccagccctggagaagcactggtgtctgcagcacccctcagttcctgtgcctcagcccacaggccactgtgataatggtctgtttagcacttctgtatttattgtaagaatgattataatgaagatacacactgtaactacaagaaattataaatgtttttcacatcaaaaaaaaaaaaaaaaaaaaaag

SEQ ID NO: 98 - DNA, 1186 bp, Homo sapiens
ggcacgagaaataatcacctggagtttgttaaaccatatggattctcaggctcctctcttgaagattctgattcagtaggtctgggagtggcgccctggattttgatcaaaattgtagagcattttaaggtgagtacctgagggagaacttaaagacatcttagttggggagtagtccttttgaattttacagctagatataatcttcagtcagataaaatttatgggagctggtgtcttatgcctgactcttagtaatttcataccggtttgaagtacgtgtgcccatgcctaaagccttgactttcagaatgttgtcttttgattcttctgtcttgatttgattaggggtgaaatttagaagtcttagtaatgtaacttgaagatgttaaacaaaaatctcaagtaaaatgaaaagcaaatatgggctactgaattaagaaactggcattctagtattaaatcctcacttcaggagcttttaaaaatactgagacccccccataaccagagattcagattcaaagactgaggataggaccttagcattgtagctatttaaagtttctaatgtgcacccagggttgggaatcaccaatgtgggtgtgaaaatgcctacaaagggttttagtgccttagaagtcctaagaagcccaatctgtatcaaagcagatccattttgcaaggatctttcttttagaactttctcagttctcttagtaagaactttagaagtaatcttgataataagcacagacagcctaacagcagaggcaacttaaataactcctgagcagttggcactagaacagaatacttggaatgacaccaaagttaaccaagtccagcatatgtccaaagagttaagtgtttcatttactgtagcattctgggtgagaaattggttgctgaaatcttaagacagtggtctcaaccttggctgcacattggaatcacctgtagggttttaaagcatccaaatggtaattaacaggcagcaaaacttcagaactagttctgcatctactgtgcaaagatcatgattaactgtcaagacactggtagaacagaacaagcaaaagattaagagttcaaaagtaaatgcaaccawtttaacatgtagtgttattaaaaaattacaaaggcctagaccagcctgggcaacagagaccatgcttaaaaaaaa

SEQ ID NO: 99 - DNA, 1120 bp, Homo sapiens
aattcggcacgaggtgaccaggagtcgacgtgtgcagaagtcctggtaatctggtccttgttcccgtctggataccagcttccttcagcagcgcaggcggtggtccctgaggcccgtggaaggagtcaaacttgcgggaattttgcagtttatctgcagggctgttgtttccagcaagacccaaagctagaaaaggaggaggaagaaactgacccgatcagtgccagaagtcattgtattcaaagaagaataagcaagaaagaaaagaaggaaggaagagaggtagacagatacaagatgaaatcctgtcaaaaaatggaaggaaaaccagaaaatgagagtgaaccaaagcatgaggaagagccaaagcctgaggaaaagccagaagaggaggagaagctagaggaggaggccaaagcaaaaggaacttttagagaaaggctgattcaatctctccaggagtttaaagaagatatacacaacaggcatttaagcaatgaagatatgtttagagaagtggatgaaatagatgagataaggagagtcagaaacaaacttatagtgatgcgttggaaggttaatcgaaaccatccttacccctatttaatgtagtttaccttgatttttatctgatattaacaataccatatagcttgctttttattagcatttcctgatattcctttgtccatatttctacttataacctgttgctattaatggttttagatgtatctcttgttatctgcatctcattgtttattgtattttgaaccaatctacaagtctctgtcttttaataaaagaactttacacatttgtaaaaaagaggttcttggtaagatataaaatggaaaaaggctaagtaatatgtgaatatcatatttttgaaaggtaaaaagtacatttgtatattacatatatggacataacttgtgaaggatgaaagaaagtacagcctctcggtggtgggattatgaatgatttttctccttttgcttgtttgtattttctatattcctaaaattaacacacattattattgctagaataataaaagttttataaaaaagaagcaaaaaaaaaaaaaaaaaaaaaaaaaaaaaaaaaagggggggga

SEQ ID NO: 100 - DNA, 1225 bp, Homo sapiens
  misc_feature (286): n equals a,t,g, or c
  misc_feature (287): n equals a,t,g, or c
  misc_feature (288): n equals a,t,g, or c
  misc_feature (1213): n equals a,t,g, or c
  misc_feature (1225): n equals a,t,g, or c
cttgctctgtcacccaggctgggagtgcagtggcatgatctctgcaacctctacctcccaggttcaagcaattcttgtgcctcagcctcccaagtaactgggactacaggtgcacgctaccacacctggctgattttttttatgttttagtagagacagggtttcaaccatgttgcccaggttggtctcaaactcctgagctcaggcaatccacccgccttggcctcccaaagtgctaggattacaggtgtgagccaccacacccagctattttttctttcggttnnnaattttaaagttggggggggtctcaatttgtttaccctggctggtctcgaactcccggacttaagcgatcctctggctccaagcccactaccagtctcaggtttctttactaaaagatcactacctttttttctcttatctgctgccatgtgagatgtggctttcaccttccgccatgattgtgaggccttcccagccacgtrgaactgtaagtccaataaacctcttttgtaaattaaaaaaaaaaaatcactatttaagatactaggatggattgtgactgttgaggagtacttacatatcctacatttgactacattatttccaaaccaagtattccatccaaaggaacatactgctatcatagagaccaaggagggactgtttaaggttgccaaggtgaagcgagctgagaggctttgtcctcgtgccagtaactctgaaatctctcttaattcctgctgtccaggcagcagaatgccatggtttccccaagtaggtagctgctttagcakttaaagcccaaatgtctgttctgttgatcagaggtctctgaatttctgaagtggtgtttcgtttctggtgactgagttaatcctttacaatccctcttgtaaagtgtgctaatagaaagaatccacctttcaaagctgcagaaccagaccgtgccctaaattgaccaacgtarctgatgtgcctcaggaagtctcttgccagctgtccctgtgaagaccccctcctcccccccagctgctgccttgcacactgaagcatctcagactgtgcaaagccrtgtagtcatcaagacagtaaatcccagggcttggttaagtgctgtgtgataacttgtttggatgagacttaacttaaaaccacttacaataaacttgggaaactaccgtcaaaaaaaaaaaaaaaaaatttngggggggcccgn

SEQ ID NO: 101 - DNA, 1213 bp, Homo sapiens
ggtagataaattgactagctgataagtaaaattaaaagaggaattttctctttcaggtaggattattgactgtgcttttactgtcacttttaatcccaaatatgatacgttattaaaagctgtaaaagatgctactaacactggaataaagtgtgctggaattgatgttcgtctgtgtgatgttggtgaggccatccaagaagttatggagtcctatgaagttgaaatagatgggaagacatatcaagtgaaaccaatccgtaatctaaatggacattcaattgggcaatatagaatacatgctggaaaaacagtgccgattgtgaaaggaggggaggcaacaagaatggaggaaggagaagtatatgcaattgaaacctttggtagtacaggaaaaggtgttgttcatgatgatatggaatgttcacattacatgaaaaattttgatgttggacatgtgccaataaggcttccaagaacaaaacacttgttaaatgtcatcaatgaaaactttggaacccttgccttctgccgcagatggctggatcgcttgggagaaagtaaatacttgatggctctgaagaatctgtgtgacttgggcattgtagatccatatccaccattatgtgacattaaaggatcatatacagcgcaatttgaacataccatcctgttgcgtccaacatgtaaagaagttgtcagcagaggagatgactattaaacttagtccaaagccacctcaacacctttattttctgagctttgttggaaaacatgataccagaattaatttgccacatgttgtctgttttaacagtggacccatgtaatacttttatccatgtttaaaaaagaaggaatttggacaaaggcaaaccgtctaatgtaattaaccaacgaaaaagctttccggacttttaaatgctaactgtttttccccttcctgtctaggaaaatgctataaagctcaaattagttaggaatgacttatacgttttgttttgaatacctaagagatactttttggatatttatattgccatattcttacttgaatgctttgaatgactacatccagttctgcacctataccctctggtgttgctttttaaccttcctggaatccattttctaaaaaataaagacattttcagatctgagaaaaaaaaaaaaaaaaaaaaaaaaaacycggggggggccggtmcccaattcg

SEQ ID NO: 102 - DNA, 1564 bp, Homo sapiens
  misc_feature (1509): n equals a,t,g, or c
ctgatgcagtaatatattcagtttatctatgcattgctggggtcttgatataagatggaaacagtgtttcttatctaaagttttgattatcagcaagttgaatggacactttagttatttaaataaagatttttgaccaaaatccagaaaatggtatgagagaaaaataaattccagctagtttaatagatttttaaatgtcaatctgattttagctcttagagagtgctaactagctkgtaatgtttacttttaattccttgttaaaatgaggcaataatttgcaagatttttgtatataagtgtaaattcttcatatctttttagatctaattcaatattttctgactacttctgccatgtataataccatttttgtgcatgcttggatgtgacattcataaattgtaccactatgactttatccatgtaaaatagctatttattgaattttcttttaaaagctggatttactgggttttttttttctctcagtttaaacatcttaacagaraawttgttactgtttattaaaagaattgcatttggaagcaagaaaacaaccggatttgcaatcatgtgaagaaacaataatgcctttattatcaagtgttaagcacaattcttataacaaactgtgataaattctttttgtttttttttcctttgccccattattttcttatgaacaaaccaaaaattcatggtgagcagttgcagtgttggctgatatatcttttatgtacagggaatttgaaaaggacagtggattcatttagaagtgtaactggtgctgtgattatagcaatacatttgttagttgtacttcatctttttcatgctagctttttaaatgtttagttttcctcttgtcatggtcagctgctgaatttacttgaaggatgtagaatactgtttaaaaaatactaaaatttgtacaattagatcaaagaattgtgcaatcatttcctttttaatttttaaaatgttgaggctcataaatatttgagaacatcagatctaatagagcatagtgatactatttaattaaccaaagtctctagtgaatatttcaactttgaatgtaaactaacaaataaacctgaccaccaaggagattgtttgcccagagtttcaaagcacattgtctacaaatggaaattgaaataatttataaaatattgacgttactatgttttttaaaaagttcctaattttttcactaaatggaggaaactattagttttattgttaaatatggtagatattaatattcctcttagatgaccagtgattccaattgtcccagtttgaaataagtaccctgtgagtatgagataaattagtgacaatcagaacaagtttcagtatcagatgttcaagaggaagttgctattgcattgattttaatatttgtacataaacactgatttttttgagcattattttgtatttgttgtactttaatacctggtgtacagttccagaaataaaaatctgggaatcttnaaaaaaaaaaaaaaaaaaaaaaaaaaaaaaaaaaaaaaaaagggcggccgctcta

SEQ ID NO: 103 - DNA, 1457 bp, Homo sapiens
aattcggcacgagccgttcaagggctcttagaggtggccaaagactcaatcccccgaagtcactggaaaaagaccccagtggtcctaaaggcaacagcaggactacgcttactgccagaacacaaagccaaggctctgctctttgaggtaaaggagatcttcaggaagtcacctttcctggtaccaaagggcagtgttagcatcatggatggatccgacgaaggcatattagcttgggttactgtgaattttctgacaggtcagctgcatggccacagacaggagactktggggaccttggacctagggggagcctycacccaaatcacgttcctgccccagtttgagaaaactctggaacaaactcctakgggctacctcacttcctttgagatgtttaacagcacttataakctctatacacatagttacttgggatttggattgaaagctgcaagactagcaaccctgggagccctggagacagaagggactgatgggcacactttccggagtgcctktttaccgagatgkttggaagcagagtggatctttgggggtgtgaaataccagtatggtgscaaccaagaaggggaggtgggctttgagccctgctatgccgaagtgctgagggtggtacgaggaaaacttcaccagccagaggaggtccagagaggttccttctatgctttctcttactattatgaccgagctgttgacacagacatgattgattatgaaaaggggggtattttaaaagttgaagattttgaaagaaaagccagggaagtgtgtgataacttggaaaacttcacctcaggcagtcctttcctgtgcatggatctcagctacatcacagccctgttaaaggatggctttggctttgcagacagcacagtcttacagctcacaaagaaagtgaacaacatagagacgggctgggccttgggggccacctttcacctgttgcagtctctgggcatctcccattgaggccacgtacttccttggagacctgcatttgccaacacctttttaaggggaggagagagcacttagtttctgaactagtctggggacatcctggacttgagcctagagatttaggtttaattaattttacacatctaatgtgaactgctgcctaaccactcaagagtacacagctggcaccagagcatcacagagagccctgtgagccaaaaagtatagttttggaacttaaccttggagtgagagcccagggacaggtccctggaaaccaaagaaaaatcgcatttcaaccctttgagtgcctcattccactgaatatttaaattttcctcttaaatggtaaactgacttattgcaatcccaagacccatcaatatcagtatttttttcctccctatacagtgccctgcccacccttatctgcacccacctcccctgaaaaagaaaaaaaaaaaaactcgtag

SEQ ID NO: 104 - DNA, 785 bp, Homo sapiens
  misc_feature (748): n equals a,t,g, or c
gtgctgatgaaaatatggaggaaatgaaactctcatgggttttgcagggaatctaagtcagtgctgtgttgtgaatgtaggtgtaccctttgaattcatatgttgaatcctaacccccaaagcaatggcattaagaggtggggcctttggggctgggatacaggagtgagccactgcgcctggctgatcccagcacttttcaaatgatgccgctcaaagccgtgacttggcctactttgaacagcaaacttgttgctgctgttgtcaacctgaaggcctctcaaatgccagcttcaagcagggtgtgaattggccagtgtcagatctcaggagtcctgtgttgagagtgtggctttcagctgcggggagctgcacttggtggggaaagccaggcaggtcaccctcacagccagataatgtggaggtcagaacccaaggaagggagtgagacctccactcccagtgggggacctggccacccatccttggggacctgagaaagcgtacttcaccttggggtgaaggctgggtggggccagagggaccagtgccctcctcagtgcttaggggcagagccacctgcagcaatggtatctgcatattagcccctctccaccttctttctcccgctgaatcatttccctcaaagcccaagagctgtcactgcttctttctccctgggaagaatgcgtggactctgcctggtgatagactgaagccagaacagtgccacaccctcgccttaatnccttgctaggtgtctcagatttatgagacttcttagt

SEQ ID NO: 105 - DNA, 921 bp, Homo sapiens
  misc_feature (40): n equals a,t,g, or c
agggaaggaccctcccctagagtctctggagggaactggnatacaattgcagagtgcactaaacagttgccccagaaagacatgtcttgttttaaagcccagaacctgaaattattatagattttattcggtaataaggaactttgcatgtgtaattacttaaggatatgaagatgagattgtcctggattattaagcaccctaaatgccatgtacaggtgtccttccaagagaacagaagaggagacacagacacagagcaggaggacacgtggagacagaggcagactggagtgatgcggccacaagcccagggacacctggagcccccaggagctgggagaggcaggaaggatcctcccctagagcctccagggggaactggaggatgcgtaagagacccagaacttccacagaaggaggaaaattaacctcctgcttctctagactgttccaaagctgaaccctagaaagcaaagctgatacagaagcatccaggctgcaggagtacaggtcgcaagtgctgagcgtgggccttgggtgtgtctcatgggggaaaaaaaactgtgaaaaacctcagagtagcatcttcacagtaacgcacggacgatccctaaactgccttgtaaacaaaaatgagagcttgagtcagaggaagccgagacaatatccttcctcgacaacgtgcgagaaccctgacgtcccccagcaaaggaagacgttgcaagcaggcaaaatgcgtcgattttttttttttgtcagtatgatgatttttgcagccacttggctatggagagcagccgacaccccctcttacagccgtggatgtttcctggaagctgactcagtctgttcactggttgagctttgagtgaaaagataacacaggtctattgactcacacacatgttttaagatgga

SEQ ID NO: 106 - DNA, 592 bp, Homo sapiens
gtgatctgcatgtggcagggctgcgcagtggagcggccagtgggcaggatgacgagccagacccctctgccccagtccccccggcccaggcggccgacgatgtctactgttgtggagctgaacgtcgggggtgagttccacaccaccaccctgggtaccctgaggaagtttccgggctcaaagctggcagagatgttctctagcttagccaaggcctccacggacgcggagggccgcttcttcatcgaccgccccagcacctatttcagacccatcctggactacctgcgcactgggcaagtgcccacacagcacatccctgaagtgtaccgtgaggctcagttctacgaaatcaagcctttggtcaagctgctggaggacatgccacagatctttggtgagcaggtgtctcggaagcagtttttgctgcagtgccgggctacagcgagaacctgggagctcatggtgcgcctggcacgtgcagaagccataacagcacggaaktccaggtgyttgtgtgcctggtgaaacttgagggagcaggatgcattattattcagaggtcctgtgtttttcttgcaggataagaagg

SEQ ID NO: 107 - DNA, 2248 bp, Homo sapiens
tctgggagtacgacatggcgcgcgagctgcgggcgctgctgctgtggggccgccgcctgcggcctttgctgcgggcgccggcgctggcggccgtgccgggaggaaaaccaattctgtgtcctcggaggaccacagcccagttgggccccaggcgaaacccagcctggagcttgcaggcaggacgactgttcagcacgcagaccgccgaggacaaggaggaacccctgcactcgattatcagcagcacagagagcgtgcagggttccacttccaaacatgagttccaggccgagacaaagaagcttttggacattgttgcccggtccctgtactcagaaaaagaggtgtttatacgggagctgatctccaatgccagcgatgccttggaaaaactgcgtcacaaactggtgtctgacggccaagcactgccagaaatggagattcacttgcagaccaatgccgagaaaggcaccatcaccatccaggatactggtatcgggatgacacaggaagagctggtgtccaacctggggacgattgccagatcggggtcaaaggccttcctggatgctctgcagaaccaggctgaggccagcagcaagatcatcggccagtttggagtgggtttctactcagctttcatggtggctgacagagtggaggtctattcccgctcggcagccccggggagcctgggttaccagtggctttcagatggttctggagtgtttgaaatcgccgaagcttcgggagttagaaccgggacaaaaatcatcatccacctgaaatccgactgcaaggagttttccagcgaggcccgggtgcgagatgtggtaacgaagtacagcaacttcgtcagcttccccttgtacttgaatggaaggcggatgaacaccttgcaggccatctggatgatggaccccaaggatgtcsgtgagtggcaacatgaggagttctaccgctacgtcgcgcaggctcacgacaagccccgctacaccctgcactataagacggacgcaccgctcaacatccgcagcatcttctacgtgcccgacatgaaaccgtccatgtttgatgtgagccgggagctgggctccagcgtttgcactgtacagccgcaaagtcctcatccagaccaaggccacggacatcctgcccaagtggctgcgcttcatccgaggtgtggtggacagtgaggacattcccctgaacctcagccgggagctgctgcaggagagcgcactcatcaggaaactccgggacgttttacagcagaggctgatcaaattcttcattgaccagagtaaaaaagatgctgagaagtatgcaaagttttttgaagattacggcctgttcatgcgggagggcattgtgaccgccaccgagcaggaggtcaaggaggacatagcaaagctgctgcgctacgagtcctcggcgctgccctccgggcagctaaccagcctctcagaatacgccagccgcatgcgggccggcacccgcaacatctactacctgtgcgcccccaaccgtcacctggcagagcactcaccctactatgaggccatgaagaagaaagacacagaggttctcttctgctttgagcagtttgatgagctcaccctgctgcaccttcgtgagtttgacaagaagaagctgatctctgtggagacggacatagtcgtggatcactacaaggaggagaagtttgaggacaggtccccagccgccgagtgcctatcagagaaggagacggaggagctcatggcctggatgagaaatgtgctggggtcgcgtgtcaccaacgtgaaggtgaccctccgactggacacccaccctgccatggtcaccgtgctggagatgggggctgcccgccacttcctgcgcatgcagcagctggccaagacccaggaggagcgcgcacagctcctgcagcccacgctggagatcaaccccaggcacgcgctcatcaagaagctgaatcagctgcgcgcaagcgagcctggcctggctcagctgctggtggatcagatatacgagaacgccatgattgctgctggacttgttgacgaccctagggccatggtgggccgcttgaatgagctgcttgtcaaggccctggagcgacactgacagccagggggccagaaggactgacaccacagatgacagccccacctccttgagctttatttacctaaatttaaaggtatttcttaacccgaaaaaaaaaaaaaaaaaaacctctgcc

SEQ ID NO: 108 - DNA, 785 bp, Homo sapiens
  misc_feature (769): n equals a,t,g, or c
  misc_feature (771): n equals a,t,g, or c
  misc_feature (785): n equals a,t,g, or c
cccagcccataaagatctgtgaccggcagccccagacctgcctgccttcctgacttctgttccagagcaaaggtcattcagccgcttgaatcagccttttccccccacccggtccccaactttgtttacccgataaggaaggtcagcattcaaagtcaagaagcgccatttatcttcccgtgcgctctacaaatagttccgtgagaaagatggccgggaactcgatcctgctggctgctgtctctattctctcggcctgtcagcaaagttattttgctttgcaagttggaaaggcaagattaaaatacaaagttacgcccccagcagtcactgggtcaccagagtttgagagagtatttcgggcacaacaaaactgtgtggagttttatcctatattcataattacattgtggatggctgggtggtatttcaaccaagtttttgctacttgtctgggtctggtgtacatatatggccgtcacctatacttctggggatattcagaagctgctaaaaaacggatcaccggtttccgactgagtctggggattttggccttgttgaccctcctaggtgccctgggaattgcaaacagctttctggatgaatatctggacctcaatattgccaagaaactgaggcggcaattctaactttttctcttccctttaatgcttgcagaagctgttcccaccatgaaggtaatatggtatcatttgttaaataaaaataaagtctttaaaaaaaaaaaaaaaaaaaaggggggccncnctaaaaaatccaan

SEQ ID NO: 109 - DNA, 611 bp, Homo sapiens
ggcacagtggtggaaggtgggtgtgtagtcgtggtactttacgcctcggtgtttagggaggagcctaaggtaaggagtcagaaacggggagtaaccgagctgcggcttttatataaggtcagtggtaggtaaggaaggggccttaacctctgctggtgaccagaagcctgcatttctgcattctgcttaattccctttccttagatttgaaagaagccaacactaaaccacaaatatacaacaaggccattttctcaaacgagagtcagcctttaacgaaatgaccatggttgacacagagatgccattctggcccaccaactttgggatcagctccgtggatctctccgtaatggaagaccactcccactcctttgatatcaagcccttcactactgttgacttctccagcatttctactccacattacgaagacattccattcacaagaacagatccagtggttgcagattacaagtatgacctgaaacttcaagagtaccaaagtgcawtcaaagtggagcctgcatctccaccttattattctgagaagactcagytctacaataagcctcatgaagagccttccaactccctcatggcaattgaat

SEQ ID NO: 110 - DNA, 664 bp, Homo sapiens
  misc_feature (24): n equals a,t,g, or c
  misc_feature (72): n equals a,t,g, or c
  misc_feature (614): n equals a,t,g, or c
  misc_feature (616): n equals a,t,g, or c
  misc_feature (633): n equals a,t,g, or c
  misc_feature (649): n equals a,t,g, or c
aattcggcacgagtttggtttttncctctatgtaggtatctggtaaagtaatgaatttatcacaaatttttnccaggccctttctggttactgtggctttatggcagccarcctttatgctcgttccatatttggtgaagatgcacttgcaaatgtcagcattgagaagccaattcaccagggaccagatgctgctgttaccggccatataagaattcgtgcaaagagccagggaatggccttaagtcttggagataaaatcaacttgtcacagaagaaaactagtatataaaaataaacaaaaagtccttgaagctttacagttaatttaggtatgggcttactggactccaacatcttttgtactctttcatgcttatatagaatctgagttcatgctgaatacttttcagccaataatttatagcctttcccttaaatcaagattgagtttaaaattatagtttgtcttttgtcttaacagttctgaatgctgtcctcaaagtatataatgtttcatgtaccaagacccttttcacagtcaataaacagatctattcataaaaaaaaaaaaaaaaagggcggcccgctctagaggaccccaagcttacgtncncgtgcattgcgacgtcntagctcttttataggngtcaccctaaatttc

SEQ ID NO: 111 - DNA, 4065 bp, Homo sapiens
tcccgccgccgcccgctgcgtccgcccagcgccagtccgcgtcccgaccggcccgcggcagcctgcgccggccatggccacctccccgcagaagtcgccttctgtccccaagtctcccactcccaagtcgcccccgtcccgcaagaaagatgattccttcttggggaaactcggagggaccctggcccggaggaagaaagccaaggaggtgtccgagctgcaggaggagggaatgaacgccatcaacctgcccctcagcccaattccctttgagctggaccccgaggacacgatgctggaggagaatgaggtgcgaacaatggtggatccaaactcacgcagacscccaagcttcaagaactgatgaaggtattaattgactggattaatgatgtgttggttggagaaagaatcattgtgaaagacctagctgaagatttgtatgatggacaagtcctgcagaagcttttcgagaaactggagagtgagaagctaaatgtggctgaggtcacccagtcagagattgctcagaagcaaaaactgcagactgtcctggagaagatcaatgaaaccctgaaacttcctcccaggagcatcaagtggaatgtggattctgttcatgccaagagcctggtggccatcttacacctgctcgttgctctgtctcagtatttccgtgcaccaattcgactcccagaccatgtttccatccaagtggttgtggtccagaaacgagaaggaatcctccagtctcggcaaatccaagaggaaataactggtaacacagaggctctttccgggaggcatgaacgtgatgcctttgacaccttgttcgaccatgccccagacaagctgaatgtggtgaaaaagacactcatcactttcgtgaacaagcacctgaataaactgaacctggaggtcacagaactggaaacccagtttgcagatggggtgtacctggtgctgctcatggggctcctggagggctactttgtgcccctgcacagcttcttcctgaccccggacagctttgaacagaaggtcttgaatgtctcctttgcctttgagctcatgcaagatggagggttggaaaagccaaaaccgcggccagaagacatagtcaactgtgacctgaaatctacactacgagtgttgtacaacctcttcaccaagtaccgtaacgtggagtgaggggctgccctgggcccaccactgcccaagagttcttgctgttggcgtactggaccctcctccgaactgccttaccctgcttattcctgtctcttgcactgtgctctcccacaagtccagctgcaacccagagatagtggaaactgaaattaggaaggaaatcatcaataactcagtgggctgacccatccctcccaggcgctggggaccaacctagcaatgaaggttgggaaggttgttcccttcccggtgccaggtccagatttccctccatgatttgggaaccagcttaggcaaaagagtccccacaagatgaaaataaagatcctagttaccattcaaaggatgctaactgtgtgtcaggccccacactaagtgctctgctctgatatactcaaggccattaatcttcaggactcccattgacgtaggtgtttcattccccttttacagatgaggaaactaaggcttggaggttaaatgacttgccagaagttggaatttttttcctctttgaacataacctctcccttctccctaaaggtaaccactattctgagtccaatcatcaaggttttgcttttctttttagctaagtatgcattcctcaatagtagacagtacaacatgtttataacaagccaattacattatgttctttgcatgttctaaagttgtgtatgtgtgtgcacatctgagcacgtgcacatgtacacctgagccaaaaacacgagaacccactgatctcaccactggggcaagctaggtcagagcttagtgattcacactgaaattggcaaattggatttaacccaattaatagtgtgtgtgtggcaggagtcatgtccctcacatcctttgtacaaatgaaaattactcttaattccttcagatttataataactctgtactttggtttcagggtgacatttgggaaggattttgtttagaattaatggagtggcacattttgcagcctttttgcttgattgcatgtaatggaaatgccctatattttcctgcaaaataagtactaaattcattatcgttaagcaaatgtacaatatgctcaggcaccgcagagagctgggcacgggcccatgtgagcatcactttggaagtagggctcttcaacagggacccttgaactttaaagaaaggaacttctttttgccttctaattgatcatttagactattctggctaagtctgcccacatgtaattaccggctaattcaagcgaggaaaaatgtaagtcatttagaccaaagccaagcagtttctttgcgtgggttactcaagggcttgtggttacttgtatctcctctatgtgaacttgactttgaaagacagagctctagtgtgccagcctgctaagtcctgtaagaatagggaagggcggaggggggtgggcagtgactaggggacgagaagcatggggaaaatatttgcactctaaacatacagagatagaggtggggcttgtggtacttaacacttgtagccatcaactgactgagaccttgggctaaataatcaattgtgctgatattacatctcgttatggaatgttcctaaatatgccaggtagacaccagcccaagtaccctcctccagaagtctgtgactaccttgtcactactttaggcccattccacaaagcccatctctggtttgagaattcattttgatctgtatctacaccacccaaagttaggcctcctataatgtccaaaacattcctttcagcctttttatttcttactgtactgtctcttactgtactgtctatctgcagtaattgaggacccataaaatttagataactacatgtctttgctcttagaattgtcactcagcataatgagcatttaacatacaaaggcaatgtactgttttgtgttgatctatgtaaaagaatacaattcttttttacataattagtgaaattttattttttattaggaaacactaaatagtgtaatatttcttttgcttttaaaaaaattcctggtagcaaatcaagataaataattgcttcattttcttgagcaatactgaagcaggatgaagtaagaggaatgcattcatttaaacatgctttgctttatgaattttgtctcttttttggtctctttttcttatattcaagttacaaatgtacaagtatccttactaagagtgctccttttgtattttacatatatacagtatgaaaatacattggaacactaggaaagtttttaaataacagttctaatttatcagaaaattgtgttttgggattgagttctttgtctcagcccagaatcccaggtcctgggcctggttttctaatgctgtcatctcagttcgatattttactttagaayctggaatctcctacttaatatatgaccatgactttgaaaggcaaaagaggaatcaagaataaataaaacaaacttaatcttcatctttaaaaaaaagaaaaaagaaaccaaaatgagaatcaacacttcataggctcactgggttttcttttcttttctgttaatttaaactcagttatttttaatgcttaatacatacatggtgcaaaatttaaaaagcgcaaataggtatctagtggaaaacctaagcctccctctctctccggcacccattacctctccctggaggcaactgttttgatccatttcttacacacactgccagagatactctaggcatgtaaagcacaaacatacatataaaatctgcgggcttcaaaaaatataagtaggatgtcatctatactgtcatacactttgttttttatcacttacttaatgttatatcttggatattgtattaccctgggtattaaaaagaactcctttcacattttaaaat

SEQ ID NO: 112 - DNA, 1492 bp, Homo sapiens
  misc_feature (8): n equals a,t,g, or c
  misc_feature (1487): n equals a,t,g, or c
  misc_feature (1491): n equals a,t,g, or c
atctctgnctcgtatccgccttgcctccacaagtgctgggattacaggtgtgagccaccacacccggcctatattgttttgaaagcatactctatatatagttaygggcagaggcacaggcatcctcagcagctgattcaggagatgatggtaaagctagctaactatgaattaaacattcacatatccagtctacctggtccagtaataatacaagcaaatcttgtatttcaggaacaaatcaaggttctcttaattttttggcttatatacaatgaagtaaaaacttgataaacatggtttcaaattgaggaggagagtcttggatgtatgttttaatatgtataccttataattctgcctctagccaaatgctatgtttgcaaaatgtggcatctgttagtttttattgtctgtgtcttctttgtttactataccttgggtaattttgtgttaccaaaaaaaaaaaaaaaaggaagtgtaatgtcagacacacaagaaaagcaaatcagtgttgtaagcttaaagtacaatttcaaaggtcattaccaacagcagggttttttttatactttaaaaacattatgctacatatcattgccattttcatattttggggttttgctactcttatacaatggaatcaatggaaatgtcatccagccactgaattgccattattatatctaaaaagtttctaagatgacagttatcactattttgttttatctccatgctgacatttgaaagaaggtactagtatccctctagccagattgcttagtttttcgttggtaatcaaacaacagttgtactaaaggaaagtaaagctaggacctaaatcagaatcatagttgcctgcatatatggtaacaaggtcgtgtgcatttgctttcacagtgatgagtgagaggatgagaagaaattatttgacatttttctgtggttgaatagaagacacctttcttttgtctttaggtttaggaggagatactaagatactggatgtttatcctatcttagtttggttggagtaataagagagaagaagagggtggactttggcttttcagtgttttttcccctaaagagtgatattgctgacgtttctatcaattttacacataatatgtggctatgaaaccatatatctcacttaagtaacaaagtaatcactttgtctatcactaagtaatagacaaaaatcattgtctattatttaaagccaacaaaacagtgtaacagttttaagttcaataatgttaagtattgtatagaaatatattggaggcaaagttcagttgatgacaattgtgtatatgttactgatgctgtaaattatttttaataaagaaaattgtattatcaaaaaaaaaaaaaaaaaaaaaaaaaaaaaaaaaaaaaaaaaaaaaaaaaaaaaaaaaaaaaaaaaaaaaaaaaaaaaaaaaaaaaaaaaaaaaaaaaaaaaaaaaaaaaaggggggcccntttna

SEQ ID NO: 113 - DNA, 1482 bp, Homo sapiens
attttttttttttttttttttttttaagctcaaatttttattaaccttggaacaaatgcaataattccttacagtcatatagcattttacaattctgaaagaattttcacatataccaattgaaccctcacaacagccctgtgaggtaggcagggtaggtgttactttcctactgctagtgaggagaacaaggctaagaggtgaagtaaggtcacacagttggtaaatgatggagctaggactagaacctaggccttctgacttgctgcctccctgagaacattcaagtaataatatcctatgctatataatgaatatttatctcctatgatgttgatcaggtctatttttatacattttacctgtttttatattacctttccctaatactgaaaaacactaaaactgatacgagacatttgagacatttcttctctgttactggactttcttagatatatcaaacactatcctaagatgaaacttctgttttgaggatccttggctataaattctcaattatgatacgaacatttattttacaaattctacaaaagtatgttgaacttaagaaaaacaaaacaggtgtgtttatattctcaaaagctttgccatctttcccaatatgactttaatatgtgtataaatggaaaacagggaaaggtgttcagcaacattacagtattattgggaaacctatgcagagtgcacataaatgcaagttacatcacattaatttgttttctttgttggccttatagaggatgaaccattagtgtctttcaggtttgatcctgtcttatatgtgacatcctcagcaacaagctaaaatgatctgaattataccaatagcggggctcaagcagcagtgatcaaaacataatatgtatgtggtaaaaaggaacacttgttcttcagtggttttgcctaggtccagtgtaattacttatcaaaacatgttttaagctacagcatctctgttaaatttagaaatgtgaaacatggaagagttatcaacttggaatacaatactaaaactgaatataactgacccaaaactacctgtcaaaagcacagtaaagcttaacaggcataaaaactaaggggtaaaacccaactgctctgacataagagtgaaaaacagcaaatgcaaaccatcaggttaaagtgaatcacaaaacattaggcatgtagagcatgttttaaaaataggaaaatgacactgagctgtattaccaggaataatatttttaaaattccaggtatggccttctacatttaatagcaatggagagaaacaagcctatgggggaggtgcagaaaatgaatgggatctagaaagggagttgagtttggaagttaaggaagtcaaagaaacaaatacatccaaaatggatttagaatctctcctctaaatccatcctttccaaaaaatgtttcctatattgagagatttggtaaaaaaaaaaaaaaaaaagtcga

SEQ ID NO: 114 - DNA, 3731 bp, Homo sapiens
  misc_feature (652): n equals a,t,g, or c
  misc_feature (3730): n equals a,t,g, or c
aaaaacttagtttagggtgacacgtatagaaggtacgccgtgcaggtaccggtccggaattcccgggtcgacccacgcgtccggagctccatccccgcctcccccgccagccgacccggctccttcaccttcccgggggacagcgactccctccagcggcagacaccccgccacgcggmccctggcaaggatactgaccgcatgagcacgtgctcctcggccagcgagcagtccgtgcagtccacccagagcaacgggagtgaaagcagcagcagtagcaacatctccaccatgttggtgacacacgattacacggcagtraaggaggatgagatcaacgtctaccaaggagaggtcgttcaaattctggccagcaaccagcagaacatgtttctggtgttccgagccgccactgaccagtgccccgcagctgagggctggattccaggctttgtcctgggccacaccagtgcagtcatcgtggagaacccggacgggactctcaagaagtcaacatcttggcacacagcactccgtttaaggaaaaaatctgagaaaaaagataaagacggcaaaagggaaggcaagttagagaacggttatcggaagtcacgggaaggactcagcaacaaggtatctgtgaaagcttctncaatcccaactacatttatgaacgttccccccagaattcgtcattccattgagtgaggtcacgtgtgagacaggggagaccgttgttcttagatgtcgagtctgtggccgccccaaagcctcaattacctggaagggccctgaacacaacaccttgaacaacgatggtcactacagcatctcctacagtgacctgggagaggccacgctgaagattgtgggcgtgaccacggaagatgacggcatctacacgtgyatcgctgtcaatgacatgggttcagcctcatcgtcggccagcctgagggtcctaggtccagggatggatgggatcatggtgacctggaaagacaactttgactccttctacagtgaagtggctgagcttggcaggggcagattctctgtcgttaagaaatgtgatcagaaaggaaccaagcgagcagtggccactaagtttgtgaacaagaagttgatgaagcgcgaccaggtcacccatgagcttggcatcctgcagagcctccagcaccccctgcttgtcggcctcctcgacacctttgagacccccaccagctacatcctggtcttagaaatggctgaccagggtcgcctcctggactgcgtggtgcgatggggaagcctcactgaagggaagatcagggcgcacctgggggaggttctggaagctgtccggtacctgcacaactgcaggatagcacacctggacctaaagcctgagaatatcctggtggatgagagtttagccaagccaaccatcaaactggctgactttggagatgctgttcagctcaacacgacctactacatccaccagttactggggaaccctgaattcgcagcccctgaaatcatcctcgggaaccctgtctccctgacctcggatacgtggagtgttggagtgctcacatacgtacttcttagtggcgtgtcccccttcctggatgacagtgtggaagagacctgcctgaacatttgccgcttagactttagcttcccagatgactactttaaaggagtgagccagaaggccaaggagttcgtgtgcttctcctgcaggaggaccccgccaagcgtccctcggctgcgctggccctccaggagcagtggctgcaggccggcaacggcagaaagcacgggcgtcctcgacacgtccagactgacttccttcattgagcggcgcaaacaccagaatgatgttcgacctatccgtagcattaaaaactttctgcagagcaggcttctgcctagagtttgacctatccagaagttctttctcattctctttcacctgccaatcagctgttaatctgaattttcaagagaaaacaagcaaacataactgatcagctgccggtatgttcatcgtgtgaaattgcattccaagtgagctgtgctcagcagtgcttggacacagagctgcaagctgcgctggggtggaggaccgtcacttacactctkcccaaggcagaggtcgcattgctgtatcacagtattttattcaggtttctgcaaaaaaataaaaagataacttttttaaacaaacatgaatagaattttgcaaatttaacgttttcaagatttattcaaggaaacaaaatgcctatgttcaaccactggtgttaatgaacaaagatactgtgcgtctctggggaagacgcacctaggtggcggccactcccatggccttgtctaggactcagagaccactcggctctgagcttccaggcgcctcgtctgtgtgcatctcacgcccgacgtggcttctgaaacgtgcattcaacctcaaacttttgcataaaatagaatgaatcgttttgctctgatgaaatgtaggccttacttgtatataagactgttcctgccttcggtctgtcattttcccacctgcctcccctacccaccccccacccaccacctggggcttcctctgggggtccgagggtcttcccatcacatgaagacatcaggttgggtcctgccccactgcccctccccctgttcctgccccaagccgtcaatcagattgtggagcagtacacagtcagatgaaaatactgtaaatgcactcattgggggttttttggttttacttcatatcatgtgcaatgttgtggctttaacattttatgcaactatttatgaagacctctgttgtacctgtaataaatatatagaaaaagcacatacttcgtatggtgagctttatggttttgtgtgtgtgttggggttggcgggtgggtgggtagggtcgtagccctgtgccatcggttcaaagagacttttcgtgaaatttgttggttttgaggactgtaaaagtgatttcatactctgaatataaaactggataatagggtaatgttttaaaatttattatgctattattcagaatgccaaagtattattttttttcccaaaatcagtctggacatttactactttttagactttttgacgttgaactttctgtataaaaattggctgggttttgagcttttggtaagaaataaaagccgattaagcactggccgccccgcggctggtacccaatgcccgagtcactgtggcagcattcgcactggtgtggggagtcctttcaactcaaggaggctgggtttctgggcaccctcgaagttttctggatgtctttttatctttctcgtgtgaactgcactacaaaagagaccagcccgcttcccaagccagccagacacctgggtcttgagccataaactggcgtagttaagctttgcagcttccagtgtattttatttattcttttgttgggtttttgtttgtttcttcttgtaaaattgtacagaaactttttaaaagaaattggattcgaaactggatgtgtattcgtaacctcataatttttatttgtgtattgtttcttttattatttcagttaaatttttacattattttgcatgtatatttctttgtacagagaccttacatgtttacacagtatgatgtgatgtaaatattttattttgccatcagttattttaaaaaattaaacatatttgcctgaaaaaaaaaaaaaaaggggggcgcnc

SEQ ID NO: 115 - DNA, 1315 bp, Homo sapiens
ggcggcagcgccggaaaggaggccaagagcgcgggcggcgaggcaagatggcggcaaccaagaggaaacggcgtggaggctttgcagttcaggcgaagaagccaaaaagaaacgaaatagatgcggagccgccagctaagcggcacgccacagcagaggaggtggaggaagaagagagggaccggatcccaggccccgtttgcaagggaaagtggaaaaataaggaacggattctcatcttttcttccagaggaataaattttagaacaagacatttaatgcaggacttgagaatgttgatgcctcattctaaagcagatactaaaatggatcgtaaggataagctatttgtgattaacgaggtttgtgaaatgaagaactgtaataaatgcatctattttgaagctaagaaaaaacaggatctctatatgtggctttcaaattcacctcacggaccatctgctaaattccttgttcaaaatattcataccctcgctgaactgaagatgactggaaactgtttgaaaggttctcggccccttttgtcttttgaccctgcttttgatgaattaccacattatgctttgktaaaagaactcttaattcagatctttagtacaccacggtatcatcccaaaagccaaccatttgtggaccacgtgtttactttcaccattttggataataggatatggtttcggaactttcagatcatagaagaagatgctgctcttgtagaaataggacctcgttttgtcttaaatctcataaagattttccagggaagttttggaggaccaactttatatgaaaatcctcactaccagtcaccaaacatgcatcggcgtgtcataagatccatcacagctgcaaaatacagagagaaacagcaagtgaaagatgtgcaaaaactgagaaagaaagagccgaagactcttcttccacatgatcccactgcagatgtttttgtaacaccagctgaggagaaaccaatagaaatacagtgggtaaaaccagagccaaaagttgatttgaaagcaagaaagaaacggatttacaaaaggcaaagaaaaatgaaacagaggatggacagtgggaaaacaaaataagtcaatggaaacctgatttgtttttcagttactttatatttattttgtattcaatgtgtaaatacttttattatctaatactatcttacgtctaattagtgtagcatttacaagaaagaaaaattaagatcttaaaatcagtgattatctttttctaaataaaatatcaccagaattcatcagttaaaaaaaaaaaaaaaaaaaaa

SEQ ID NO: 116 - DNA, 1320 bp, Homo sapiens
ggctggcttctgcgtggtgcagctgcgcacgtgtttcagccggcagcgctttaagatttccggggatggaatccgaaatggaaacgcagagcgccrgggcagaggagggctttacccaggtcacccgcaagggtggccgacgggcgaagaaacgacaggctgaacagctgtccgcagcaggagagggcggggatgcgggccgcatggacacagaggaggccaggccggcgaagaggcccgtcttcccacccctctgtggggacgggctcctgagtgggaaagaagaaacaaggaaaattccagtcccagctaacagatacacaccattgaaagaaaactggatgaagatatttactcctattgtggaacatttgggacttcagatacgctttaacttgaaatcaaggaatgtagaaatcaggacttgtaargaaaccaaggatgttagtgctctgacaaaagcagctgattttgtgaaagcttttattctcggctttcaggtggaggatgcacttgccctcatcaggttggatgacctcttcctagagtcttttgaaattacagatgttaaacccctaaagggagaccatctatccagggcaataggaagaatcgctggcaaaggaggaaaaaccaaattcaccatagagaatgtgacacggacaaggatagttttggctgatgtgaaagttcacatccttggctccttccaaaatatcaagatggcaagaactgccatttgcaacctaatcttgggaaatcctccttccaaggtttatggcaatattcgagctgtggctagcagatcagcagatcgattctgatttcaagtcagagactttttatcttgcctttggactctggtgaaaaatactttacagtggtcggtcacaagaaaccatctgaacaatttcagtcatttgaagcctccgtcccttcttccattctcagccagaagcataaacagaaaagaaagatttaagaggattcacactcaacaggttttaggataatttaaatatcaaaaattgattgttatacttacacattaggtataatttatcatttatctgaaatcacatgtagcagattgcatagtctgtaatcctctcagagggaaacttcttgtttaaacagctctatatggatttatacttttatatttataaatttataacttcatacaaatttataaacatttctttataaattgtaatttaatagattatctcagaaaaacctctctgaatgatgacccttccttaatactgggtgatgtgtgaatatttgtttgttggcagacagggtctcactttgtca

SEQ ID NO: 117 - DNA, 2025 bp, Homo sapiens
  misc_feature (1339): n equals a,t,g, or c
  misc_feature (1916): n equals a,t,g, or c
  misc_feature (1944): n equals a,t,g, or c
ttattttacagcctcaaatatttctcattatcttgtcacttagttcttcatgtttctccttctgacttttaataatggtaataggaaaacaaaacccaaagcttttcagaacttcagtgtgaggtttcctattttracaagttaacttgtaaatactcaggttttacgatgtataatttacctaatagaccaaactaactcatggagatattttgaactattatttaggtacaaactttataaagaatgttagtatgtcataaaatataacattacagcttatttaaaaccaaatatagttgaacatatttaaaatacattttcacagaatggatgaattagttgtttcttcagagttacttatgaacagttgaatgctttaaaatgttctgtctgtaggtaacatctaaaacacaagtgggtttatttaaatttttaaaatttgaaattttttatttgcaaaaaattgttttatgctttattatatcgcaaatgagtgtcagatttttgagtaccaatgatcatgcttccattttttttagttttaaaccaccaaaccaatatttttcctttaaattttaatcttataatatagaaatcttatgtaaatgaaattttgtcatgtttcaaataaagagaactgaagtagaaaatagaaatgccagtaaacaacataatgtttaatttacaacttacattaggggtttgggggaatgctaattatatattgagaatatacattagaactcttcaaaatgggctcttctaatgaggtcactactgaacaaaattgttccctcttctgttaaatagaataggtttaaatgactagtcaaatgaattattttcttcttgttaaataaattaaatcttactttcttttaatgaccaaccttaggtaaaacaaaaatattgtaatcctagaaattatcctccagctttctcacctgaaaatctattgaagtgatccctggtcatcctaataatgggatgagggaagtttccagcagatttcaggctgttcttaaagtttttgttggtcattttctcaatagtacatgaaatcaagatgcttatgagcatggaaatgtatttaaagtttttgcttgtgtcctcctcagtcagaatagaaaagtaactgaaatactcttacctttctgtccttgataaaatagtaaagaaaaccaaacaaacccaggcctgatgggaaaaatgattcctttattctagcaacttactttctgttggtatgggaaatgttattaatttctattactaaagttcatatcacaaaatgatatttaataataaccttggggtaaatcatgaattttttttnctacgtgtgagtataaaagacaaaagttgaacagcatggaatctcattgccaaattattagtgaatgtatagttcaggtattctttgagacacacagtatcattaatttccgaattgtatttcagtgttattttttgtttgtgaccactaagcttctgtcttaatacaaagctgttaccttctacagaatttaagtctgaagatgtaaagagagaacaggccttgtgtaacagaagatactcttttttatgctccttactgtgatcacagaaaaattaaaaatccaagtgctctctagatttgttgataaacattttatgcttgcatttaaacttgaaatgtatgagcagaatgagacaatcagttaaatcagaaatgagaagtattataatgtaaaggccttgttttgctgtagcaataaaatgaccaagtgcaatgacttgatttaataaaatcatattttaaaagtgctgstatgaawatttttggctataaaattttaccctgacttgstttcaataactgttacgtaatgcagtttgatgttgtaacctaacattccaaaaaaaaaattganagggggaatctcaaaatagtatatactncactaacttgtttacaggtgctgtatttaaaagcatgcttctctctcaaaaagaaaaattaaaggattttattgccaaacc

SEQ ID NO: 118 - DNA, 1295 bp, Homo sapiens
  misc_feature (1286): n equals a,t,g, or c
  misc_feature (1292): n equals a,t,g, or c
ggcacgaggtgcagttacacgttttcctccaaggagcctcggacgttgtcacgggtttggggtcggggacagagcggtgaccatggccaggctggcgttgtctcctgtgcccagccactggatggtggcgttgctgctgctgctctcagcagctgagccagtaccagcagccagatcggaggaccggtaccggaatcccaaaggtagtgcttgttcgcggatctggcagagcccacgtttcatagccaggaaacggggcttcacggtgaaaatgcactgctacatgaacagcgcctccggcaatgtgagctggctctggaagcaggagatggacgagaatccccagcagctgaagctggaaaagggccgcatggaagagtcccagaacgaatctctcgccaccctcaccatccaaggcatccggtttgaggacaatggcatctacttctgccagcagaagtgcaacaacacctcggaggtctaccagggctgcggcacagagctgcgagtcatgggattcagcaccttggcwcagctgaagcagaggaacacgctgaaggatggtatcatcatgatccagacgctgctgatcatcctcttcatcatcgtgcctatcttcctgctgctggacaaggatgacagcaaggctggcatggaggaagatcacacctwcgagggcctggacattgaccagacagccacctatgaggacatagtgacgctgcggacaggggaagtgaagtggtctgtaggtgagcacccaggccaggagtgagagccaggtcgccccatgacctgggtgcaggctccctggcctcagtgactgcttcggagctgcctggctcatggcccaacccctttccyggaccccccagctggcctctgaagctggcccaccagagctgccatttgtctccagcccctggtccccagctcttgccaaagggcctggagtagaaggacaacagggcagcaacttggagggagttctctggggatggacgggacccagccttctgggggtgctatgaggtgatccgtccccacacatgggatgggggaggcagagactggtccagagcccgcaaatggactcggagcygagggcctcccagcagagcttgggaagggccatggacccaactgggccccagaagagccacaggaacatcattcctctcccgcaaccactcccaccccagggagccctggcctccagtgccttcccccgtggaataaacggtgtgtcctgagaaaccamaaaaaaaaaaaaaaaaaaaaaaaangggggnccc

SEQ ID NO: 119 - DNA, 1257 bp, Homo sapiens
tggacagacctcagcaacacagcaatgtgcactttgtagtaaagaaataccaacttgagtttttaaaaaacctagttagtcctacattcccttttctttaaaaaaactttattgttcacattattttaatgactatgagataatgtatatgacagcactttgagaaaatatcaactgtaatataactataaggttgtagtattgtctgtttaaaagataagacagttgattcaatgtggatggaccctgtggggtacctgaaaatgtagatacgtaagaatcacctctgtcatttatcacatttagaaatatgaaactgcttaacaggtatgagcaggtatagcaagtgtttgctaaagttgtagttcagagctgaattacttcaggaaactagggaccaactttttggtttaattccgatctttaaaaagtaagaatgtgtactcactccagaacacagaagctcttccaaggaccttgactcaagaaggatgaggtcctcttactcttctccatttatccactatatgcttggccatttatcctaaatgtggtgggaacagacttgttatctgttgatgttgacagtgtcttttttaacctatgtcctgcatagttttgttaggtttacagggggaggtggatggccataaaaccagtgcactttgggaattacttttctaggatttcctaccagttataaatgacattgacatttgtcatcttttttttctttttctaaaaagaatagctgaatttaattcacctattataaaatactcaaaagtaaattgcmttggtggccacttctgaattatagctacatttcattatgaccccttctgctcwcttccattttgctactgatgtcattcttgttatcaggctgtgcccctaccaggagttcatattgggttgacagggttatctatatttttgttcttgatttttgagttttatcatcttgcattaaattgttccacctggatttggggttcatctctgtgccctaaggatctgctatgaccaatcctctttttgtaggtgggtctctggcttaagtattgataggcttcagcggtttgtgtctctgtcttagcttgtatcaagccagtagtagctcacttcctttgtaaattcctgcttcagtctgggatccgtaggagtatgtgagaacttctgaaacgtctccaactcttaacagtcaagatatctatatcatttggawagagttctggktttccaactactaagacc

SEQ ID NO: 120 - DNA, 397 bp, Homo sapiens
  misc_feature (325): n equals a,t,g, or c
  misc_feature (378): n equals a,t,g, or c
  misc_feature (395): n equals a,t,g, or c
ccccaggaaaataccaaacctaggtttaaaaatagggaagggaagggagagaagaaagggaagataaagaaagcccaacctccttccaaaatgtcatgagaatcttgagcacatatggtccttggcatgaccacatgacctgcagagcccctgttatagaactcatttttatattttccttagtataacagttaatataatatgtcatttttgttaatagtgtctttttgtcattttactttttaaaagattttattgaaatatacatacaggaaagtgcatctatcataagtgtgccaaattgatggaattctaaaatctttantggtacctgtttagcacatagattggacacggaacataactaacaaccagaantctccgtgtactccctncc

SEQ ID NO: 121 - DNA, 876 bp, Homo sapiens
cccacgcgtccgggaagtgcttactcgtcgtctccatgcgccggttcctgggcgtcttagagccaaggcgcgaggctcggagtgagaggtagagctggaggggaccctaagcgccctccgcccgggacgtgagccgctgcgcccaccgggctagacccggcgccatcatgctgcttctgccaagcgccgcggacggccggggcaccgccatcacccacgctctgacctctgcctctacactctgtcaagttgaacctgtgggaagatggtttgaagcttttgttaagaggagaaacagaaatgcttctgcctcttttcaggaactggaggataagaaagagttatccgaggaatcagaagatgaagaattgcagttggaagagtttcccatgctgaaaacacttgatcccaaagactggaagaaccaagatcattatgcagttcttggacttggccatgtgagatacaaggctacacagagacagatcaaagcagctcataaagcaatggttttaaaacatcacccagacaaacggaaagcagctggtgaaccaataaaagaaggagataatgactacttcacttgcataactaaagcttatgaaatgttatctgatccagtgaaaagacgagcatttaacagtgtagatcctacttttgataactcagttccttctaaaagtgaagcaaaggataatttcttcgaagtgtttaccccagtgtttgaaaggaattccagatggtcaaataaaaaaaatgttcctaaacttggtgatatgaattcatcatttgaagatgtagatatattttattctttctggtataattttgattcttggagagaattttcttatttagatgaagaagaaaaaaaaa

SEQ ID NO: 122 - DNA, 1278 bp, Homo sapiens
  misc_feature (107): n equals a,t,g, or c
  misc_feature (128): n equals a,t,g, or c
  misc_feature (149): n equals a,t,g, or c
  misc_feature (1228): n equals a,t,g, or c
  misc_feature (1231): n equals a,t,g, or c
  misc_feature (1262): n equals a,t,g, or c
  misc_feature (1269): n equals a,t,g, or c
ccaggaaggcctttggaatgcaaacatttttggtccccatcgaaatgttcgaaagactaaggaagataaaaagagttgacgggcgccgacctgaaggactgcgtcanacaacagcctgagcagcaatncagcctccccagcgtgcaganctgccggcgcctgcgtgagaggagggtcgccagctgggccgtgtcctttgagcgcctgctgcaggaccccgtcggtgtccgctacttctctgattttctaaggaaagaattcagtgaagaaaacattttattctggcaggcctgtgaatattttaatcatgttcctgcacatgacaaaaaggagctttcctacagggcccgggagattttcagtaagtttctctgcagcaaagccaccaccccggtcaacatcgacagccaggcccagctagcagacgacgtcctccgcgcacctcacccagacatgttcaaggagcagcagctscagatcttcaatctcatgaagtttgatagctacactcgctttctgaagtccccgctgtaccagggaatgcatcctgggcggaagtggagggccgtgcactcccggactcgcagcaggtccccagcagcccggcttccaagcacagcctcggttcagaccactccagtgtgtccacgccaaaaaagttaagtggaaaatcaaaatccggccgatcccttgaatgaagagctgggggatgaggacagcgagaagaagcggaaaggcgcgtttttctcgtggtcgcggaccaggagcaccgggaggtcccagaaaaagagggagcacggggaccacgcagacgacgccctgcatgccaatggaggcctgtgtcgccgagagtcgcagggctctgtgtcctctgcggggagcctggacctgtcggaggcctgcaggactttggcacccgagaaggacaaggccaccaagcactgctgcattcatctcccggatgggacatcctgcgtggtggctgtcaaggcgggcttctccatcaaagacatcctgtccggactctgtgagcggcatggcatcaacggggcggccgcggacctcttcctggtgggcggggacaagcctctggtgcttgcaccaagacagtagcatcttgggagtcaagggacctgcgccttaggaaaagcggcacctttgttttcgggttggatctttgtttccgatttaaccggttcatggggattcaaggccaagcccaccaagnccnttacggaggtgctgcggccctggtggccagntacggcntggactcat

SEQ ID NO: 123 - DNA, 3115 bp, Homo sapiens
ggcacgagcgcgggcagcgagcgcactcggcggacgcaagggcggcggggagcacacggagcactgcaggcgccgggttgggacagcgtcttcgctgctgctggatagtcgtgttttcggggatcgaggatactcaccagaaaccgaaaatgccgaaaccaatcaatgtccgagttaccaccatggatgcagagctggagtttgcaatccagccaaatacaactggaaaacagctttttgatcaggtggtaaagactatcggcctccgggaagtgtggtactttggcctccactatgtggataataaaggatttcctacctggctgaagctggataagaaggtgtctgcccaggaggtcaggaaggagaatcccctccagttcaagttccgggccaagttctaccctgaagatgtggctgaggagctcatccaggacatcacccagaaacttttcttcctccaagtgaaggaaggaatccttagcgatgagatctactgcccccctgagactgccgtgctcttggggtcctacgctgtgcaggccaagtttggggactacaacaaagaagtgcacaagtctgggtacctcagctctgagcggctgatccctcaaagagtgatggaccagcacaaacttaccagggaccagtgggaggaccggatccaggtgtggcatgcggaacaccgtgggatgctcaaagataatgctatgttggaatacctgaagattgctcaggacctggaaatgtatggaatcaactatttcgagataaaaaacaagaaaggaacagacctttggcttggagttgatgcccttggactgaatatttatgagaaagatgataagttaaccccaaagattggctttccttggagtgaaatcaggaacatctctttcaatgacaaaaagtttgtcattaaacccatcgacaagaaggcacctgactttgtgttttatgccccacgtctgagaatcaacaagcggatcctgcagctctgcatgggcaaccatgagttgtatatgcgccgcaggaagcctgacaccatcgaggtgcagcagatgaaggcccaggcccgggaggagaagcatcagaagcagctggagcggcaacagctggaaacagagaagaaaaggagagaaaccgtggagagagagaaagagcagatgatgcgcgagaaggaggagttgatgctgcggctgcaggactatgaggagaagacaaagaaggcagagagagagctctcggagcagattcagagggccctgcagctggaggaggagaggaagcgggcacaggaggaggccgagcgcctagaggctgaccgtatggctgcactgcgggctaaggaggagctggagagacaggcggtggatcagataaagagccaggagcagctggctgcggagcttgcagaatacactgccaagattgccctcctggaagaggcgcggaggcgcaaggaggatgaagttgaagagtggcagcacagggccaaagaagcccaggatgacctggtgaagaccaaggaggagctgcacctggtgatgacagcacccccgcccccaccaccccccgtgtacgagccggtgagctaccatgtccaggagagcttgcaggatgagggcgcagagcccacgggctacagcgcggagctgtctagtgagggcatccgggatgaccgcaatgaggagaagcgcatcactgaggcagagaagaacgagcgtgtgcagcggcagctgctgacgctgagcagcgagctgtcccaggcccgagatgagaataagaggacccacaatgacatcatccacaacgagaacatgaggcaaggccgggacaagtacaagacgctgcggcagatccggcagggcaacaccaagcagcgcatcgacgagttcgaggccctgtaacagccaggccaggaccaagggcagaggggtgctcatagcgggcgctgccagccccgccacgcttgtctttagtgctccaagtctaggaactccctcagatcccagttcctttagaaagcagttacccaacagaaacattctgggctgggaaccagggaggcgccctggtttgttttccccagttgtaatagtgccaagcaggcctgattctcgcgattattctcgaatcacctcctgtgttgtgctgggagcaggactgattgaattacggaaaatgcctgtaaagtctgagtaagaaacttcatgctggcctgtgtgatacaagagtcagcatcattaaaggaaacgtggcaggacttccatctgtgccatacttgttctgtattcgaaatgagctcaaattgattttttaatttctatgaaggatccatctttgtatatttacatgcttagaggggtgaaaattattttggaaattgagtctgaagcactctcgcacacacagtgattccctcctcccgtcactccacgcagctggcagagagcacagtgatcaccagcgtgagtggtggaggaggacacttggatatttttttagtttttttttttttggcttaacagttttagaatacattgtacttatacaccttattaatgatcagctatatactatttatatacaagtgataatacagatttgtaacattagttttaaaaagggaaagttttgttctgtatattttgttaccttttacagaataaaagaattacatatgaaaaaccctctaaaccatggcacttgatgtgatgtggcaggagggcagtggtggagctggacctgcctgctgcagtcacgtgtaaacaggattattattagtgttttatgcatgtaatggactatgcacacttttaattttgtcagattcacacatgccactatgagctttcagactccagctgtgaagagactctgtttgcttgtgtttgtttggcagtctctctctgccatggccttggcaggctgctggaaggcagcttgtggaggccgttggttccgcccactcattccttctcgtgcactgctttctccttcacagctaagatgccatgtgcaggtggattccatgccgcagacatgaaataaaagctttgcaaaggcaaaaaaaaaaaaaaaaraaaamaaaaaaaaamaaaraaaaaaaaaa

SEQ ID NO: 124 - DNA, 379 bp, Homo sapiens
  misc_feature (340): n equals a,t,g, or c
  misc_feature (344): n equals a,t,g, or c
  misc_feature (366): n equals a,t,g, or c
atgaatcgggttattgaagaagatggaaccagtgcttaatttgtcttgtctaaggtggaaatcttgtgctgtttaaaaagcagattttattctttgccttttgcatgactgatagctgtaactcacagttaacatgctttcagtcaagtacagattgtgtccactggaaaggtaaatgattgcttttttatattgcatcaaacttggaacatcaaggcatccaaaacactaagaattctatcatcacaaaaataattcgtctttctaggttatgaagagataattatttgkctggtaagcatttttataaacccacycattttatatttagraaaatccnaaangggtgggggacgcccttgtagngaccttccaatac

SEQ ID NO: 125 - DNA, 1267 bp, Homo sapiens
ggcacagttgaggctggtgactgtggccggctgggagtaggcggcagtgagtttccctgggagggcagcgcgcttggcgcttctcccctccccccgatctgcctccagtctcggacttggttgttgcgcgctccggctccggctgagctgggagagttggaggaggtggcggcgggcagaggtgatgtctgggagcccttccttgacagcccgggccgagaagagtccctgcaggaagcatcacccaggctggcagatcatggtagcagcagcgggggtggctgggaagtgaaacggagccagcggctgaggaggggccccagcagcccccgaaggccctatcaggacatggagtatgaaagacgtggtggtcgtggtgacaggactggccgctatggagccactgaccgctcgcaggatgatggtggggagaaccgcagccgagaccacgactaccgggacatggactaccgttcatatcctcgcgagtatggcagccaggagggcaagcatgactatgacgactcatctgaggagcagagtgcggaggattcctacgaggcctccccgggctccgagactcagcgtaggcggcggcggcggcacaggcacagccccaccggcccgccaggcttcccccgagacggcgactatcgggaccaggactatcggaccgagcaagggaggaggaggaggaggargaggatgaggaggaggaggagaaggccagtaacatcgtcatgctgaggatgctgccacaggcasccactgaggatgacatccgtggccagytgcagtcgcacggcgtgcaagcacgggargttcggytgatgcggaacaaatcttcaggtcagagccggggcttcgccttcgtcgagtttagtcacttgcaggacgctcacgatggatggaagccaatcagcactccctcaacatcctgggccagaaggtgtcgatgcactacagtgaccccaagcccaagatcaatgaggactggctgtgcaataagtgtggcgtccagaacttcaaacgccgagagaagtgcttcaaatgtggcgtgcccaagtcagaggcagagcagaagctgcccctcggmacgaggytggatcagcagacactgccactgggtgkccgggagctgagccagggcctgcttyccctgccgcagccctaccaggcccagggagtcctggcctcccaagccctgtcacagggctcggagccaagctcagagaacgccaatgacaccatcattttgcgcaacctg

SEQ ID NO: 126 - DNA, 841 bp, Homo sapiens
gcgttacsatcgtccgtgcgcaccgcccggcgtccaggtgagtctcccatctgcagagacgcggacgcgccggcccgcagttggcctgcggagcgcggtggacggtttggcgcccaccaggcgatcaatactttggatttttaatttctagatttggcaattcttcgctgaagtcatcatgagctttttccaactcctgatgaaaaggaaggaactcattcccttggtggtgttcatgactgtggcggcgggtggagcctcatctttcgctgtgtattctctttggaaaaccgatgtgatccttgatcgaaaaaaaaatccagaaccttgggaaactgtggaccctactgtacctcaaaagcttataacaatcaaccaacaatggaaacccattgaagagttgcaaaatgtccaaagggtgaccaaatgacgagccctcgcctctttcttctgaagagtactctataaatctagtggaaacatttctgcacaaactagattctggacaccagtgtgcggaaatgcttctgctacatttttagggtttgtctacattttttgggctctggataaggaattaaaggagtgcagcaataactgcactgtctaaaagtttgtgcttattttcttgtaaatttgaatattgcatattgaaatttttgtttatgatctatgaatgtttttcttaaaatttacaaagctttgtaaattagattttctttaataaaatgccatttgtgcaagaaaaaaaaaaaaaaaaaaagggcggccgctctagaggatccctcgaggggcccaagcttacgcgtgcatgcgacgtcatagctctgtccctacgaag

SEQ ID NO: 127 - DNA, 1172 bp, Homo sapiens
  misc_feature (119): n equals a,t,g, or c
tactatttatagctttagatagggcctcccttcccctcttctttctttgttctctttcattaaaccccttccccagtttttttttatactttaaaccccgctcctcatggccttggccntttctgaagctgcttcctcttataaaatagcttttgccgaaacatagtttttttttagcagatcccaaaatataatgaaggggatggtgggatatttgtgtctgtgttcttataatatattattattcttccttggttctagaaaaatagataaatatatttttttcaggaaatagtgtggtgtttccagtttgatgttgctgggtggttgagtgagtgaattttcatgtggctgggtgggtttttgcctttttctcttgccctgttcctggtgccttctgatggggctggaatagttgaggtggatggttctaccctttctgccttctgtttgggacccagctggtgttctttggtttgctttcttcaggctctagggctgtgctatccaatacagtaaccacatgcggctgtttaaagttaagccaattaaaatcacataagattaaaaattccttcctcagttgcactaaccacgtttctagaggcgtcactgtatgtagttcatggctactgtactgacagcgagagcatgtccatctgttggacagcactattctagagaactaaactggcttaacgagtcacagcctcagctgtgctgggacgacccttgtctccctgggtaggaggggggggaatgggggagggctgatgaggccccagctggggcctgttgtctgggaccctccctctcctgagaggggaggcctggtggcttagcctgggcaggtcgtgtctcctcctgaccccagtggctgcggtgaggggaaccaccctcccttgctgcaccagtggccattagctcccgtcaccactgcaacccagggtcccagctggctgggtcctcttctgcccccagtgcccttccccttgggctgtgttggagtgagcacctcctctgtaggcacctctcacactgttgtctgttactgattttttttgataaaaagataataaaacctggtactttctaaaaaaaaaaaaaaaaaaaaaaaaaaaaaaaaaaaaaaaaaaaaaaaaaaagggcggccgctcgcgatctagaactag

SEQ ID NO: 128 - DNA, 891 bp, Homo sapiens
acccacgcgtccgtgagattctctcccaggccacaagacatttcctgctcggaaccttgtttactaatttccactgcttttaaggccctgcactgaaaatgcaagctcaggcgccggtggtcgttgtgacccaacctggagtcggtcccggtccggccccccagaactccaactggcagacaggcatgtgtgactgtttcagcgactgcggagtctgtctctgtggcacattttgtttcccgtgccttgggtgtcaagttgcagctgatatgaatgaatgctgtctgtgtggaacaagcgtcgcaatgaggactctctacaggacccgatatggcatccctggatctatttgtgatgactatatggcaactctttgctgtcctcattgtactctttgccaaatcaagagagatatcaacagaaggagagccatgcgtactttctaaaaactgatggtgaaaagctcttaccgaagcaacaaaattcagcagacacctcttcagcttgagttcttcaccatcttttgcaactgaaatatgatggatatgcttaagtacaactgatggcatgaaaaaaatcaaatttttgatttattataaatgaatgttgtccctgaacttagctaaatggtgcaacttagtttctccttgctttcatattatcgaatttcctggcttataaactttttaaattacatttgaaatataaaccaaatgaaatattttactgataagattcttcatgcttctttgctctccttaaaatgtctttttcactagttagttccaagggtcagtctcataattttgttcttatactttgatttcctttttctttttttttttttttaatagagttgggggatcyttcyttcttttttttttttttttt

SEQ ID NO: 129 - DNA, 2461 bp, Homo sapiens
  misc_feature (14): n equals a,t,g, or c
  misc_feature (1164): n equals a,t,g, or c
tttcaattcttggntttctgttcccttctaccaaaacccagcataggactcagtgtacacttactttaaaacaaaaactcacatttcttagctgcaggtgatggcctcagtcattttaatacagcctggaatgagtttgcttattacccagtcactttcgtagtgaatgttcaaaccccaaagcaaatgtttgcatctccttgtccataaaggagaaagccaggttataggagaaagagagagaaaggcgcatgtctgtttgcacagagagaggcaattttgtctacctttcgagaatcagttataaacagaagggcctcttaggattttgagctctcctgacaatgaaggaaaagctctcttgagtatacaagttccacactcattacctttcagtggtgacccatcacccactacaatttgttgaaggaagggagtgtcagagatatgctttaaagttgtactttaggctgaaattctctctgtatttggacctgcagatgttgtgtacagaaccgatgcatggcagggtcaggaagctaggagagtgaaggcgcttgtggagacagctctgtagcaaatgaaacacggaagcctccgggaatgtgtttgtgtcaccagcagcaggcatttccctgtcctccccacccccagtctccacatccccagcagcctcttccagaagcatgtcagggagacggacaggtgctctccttctcgtgcaccacatccaagtccacccaccgtggacgcagtgtgactaaatgctggccttgaagagaaaccctcagccagcttgtctgttgtccaggtccctcagtgtctctggtttccctgccctgcataatttaagcattagtgccaaatacatctgtcatattcctctccctggagactgcgaaatgtccagactttttcagactagtggagggaaggaatgttacataactaagtggaggcctggaactgtcaggatttgacagggctggaccagagacccttccgcctctgcctagtgtgtctgtcaggcaggcagcagccatcaatccaagaatgagccatggcggcaagcactktgtggagaaaggaacccagccgaggtctgagtttcagacagaaactggggagttgggacatcttctctgtgccaggcttcattgacancatcggtccttcattgasctgagcccaagccctcagtggaacctgtcaagagcatcagcagcatggagctgaagaccgagccctttgatgacttcctgttcccagcatcatccaggcccagtggctctgagacagcccgctccgtgccagacatggacctatctgggtccttctatgcagcagactgggagcctctgcacagtggctccctggggatggggcccatggcacagagctggagcccctgtgcactccggtggtcacctgtactcccagctgcactgcttacacgtcttccttcgtcttcacctaccccgaggctgactccttccccagctgtgcagctgcccaccgcaagggcagcagcagcaatgagccttcctctgactcgctcagctcacccacgctgctggccctgtgagggggcagggaaggggaggcagccggcacccacaagtgccactgcccgagctggtgcattacagagaggagaaacacatcttccctagagggttcctgtagacctagggaggaccttatctgtgcgtgaaacacaccaggctgtgggcctcaaggacttgaaagcatccatgtgtggactcaagtccttacctcttccggagatgtagcaaaacgcatggagtgtgtattgttcccagtgacacttcagagagctggtagttagtagcatgttgagccaggcctgggtctgtgtctcttttctctttctccttagtcttctcatagcattaactaatctattgggttcattattggaattaacctggtgctggatattttcaaattgtatctagtgcagctgattttaacaataactactgtgttcctggcaatagtgtgttctgattagaaatgaccaatattatactaagaaaagatacgactttattttctggtagatagaaataaatagctatatccatgtactgtagtttttcttcaacatcaatgttcattgtaatgttactgatcatgcattgttgaggtggtctgaatgttctgacattaacagttttccatgaaaacgttttattgtgtttttaatttatttattaagatggattctcagatatttatatttttattttatttttttctaccttgaggtcttttgacatgtggaaagtgaatttgaatgaaaaatttaagcattgtttgcttattgttccaagacattgtcaataaaagcatttaagttgaatgcgaaaaaaaaaaaaaaaaaaaaaaaaaaaaaaaaaaaaaaaaaaagggcggccgctcgcgatctagaactagt

SEQ ID NO: 130 - DNA, 2197 bp, Homo sapiens
  misc_feature (1381): n equals a,t,g, or c
  misc_feature (2194): n equals a,t,g, or c
gacgagatctgtgtcagaacgtgcgtgtgagcggatacaaaacccgagagaggcgtgagcagcgctgtgtttgcgagcggkagcgaggrgcgccggctgrggtgtgtgctcctgagctcttcagaaaccaggctgctttcaggaacattgctgtggattcccagggcctattccactagaagcaagatggctgaactcaatactcatgtgaatgtcaaggaaaagatctatgcagttagatcagttgttcccaacaaaagcaataatgaaatagtcctggtgctccaacagtttgattttaatgtggataaagccgtgcaagcctttgtggatggcagtgcaattcaagttctaaaagaatggaatatgacaggaaaaaagaagaacaataaaagaaaaagaagcaagtccaagcagcatcaaggcaacaaagatgctaaagacaaggtggagaggcctgaggcagggcccctgcagccgcagccaccacagattcaaaacggccccatgaatggctgcgagaaggacagctcgtccacagattctgctaacgaaaaaccagcccttatccctcgtgagaaaaagatctcgatacttgaggaaccttcaaaggcacttcgtggggtcacaggcccaaatattgagaaatcagtgaaggatttgcaacgctgcaccgtttctctaactagatatcgcgtcatgattaaggaagaagtggatagttccgtgaagaagatcaaagctgcctttgctgaattacacaactgcatcattgacaaagaagtttcattaatggcagaaatggataaagttaaagaagaagccatggaaatcctgactgctcgtcagaagaaagcagaagaactaaagagactcactgaccttgccagtcagatggcagagatgcagctggccgaactcagggcagaaattaagcactttgtcagcgagcgtaaatatgacgaggagctcgggaaagctgcccggttttcctgtgacatcgaacagctgaaggcccaaatcatgctctgcggagaaattacacatccaaagaacaactattcctcaagaactccctgcagctccctgctgcctctgctgaatgcgcacgcagcaacctctgggaaacagagtaacttttcccgaaaatcatccactcacaataagccctctgaaggcaaagcggcaaaccccaaaatggtgagcagtctccccagcaccgccgacccctctcaccagaccatgccggccaacaagcagaatggatcttctaaccaaagacggagatttaatccacagtatcataacaacaggctaaatgggcctgccaagtcgcagggcagtgggaatgaagccgagccactgggaaagggcaacagcngccacgaacacagaagacagccgcacaacggcttccggcccaaaaacaaaggcggtgcaaaaatcaagaggcttccttggggatgaagacccccgaggccccggcccattctgaaaagccccggcgaaggcagcacgctgcagacacctcggaggccaggcccttccggggtagtgtcggtagggtttcacagtgcaatctctgccccacgagaatagaagtttccacagatgcagcagttctctcagtcccggctgtgacgttggtggcctgagctaggaggaaaaagagcagttttcactcagttttggttccctgcccgaggtgctgacccaattcgctgccaaaagagtgtcaatcagaatatacaaatcccgtatggttgtgtcatcctctcttaatcatttttactaattctaataatcagctctagcttgcttcataattttcatggctttgcttgatctgttgatgctttctctcatcaagactttgcagcattttagccaggcagtatttactcattattaggaaaatcaagatgtggctgaagatcagaggctcagttagcaacctgtgttgtagcagtgatgtcagtccattgattgtctttagagagttaatgttacaaaaaagaattcttaataatcagacaaacatgatctgctgaggacacatgcgcttttgtagaatttaacatctggtgtttttctgaaaaaatatatatacatatattgctttatttgaaacaaattaaaatatgctgcatttgaaaaaaaaaaaaaaaaaaaaaaaaaaaaaaaaaaaaaaaanaaa

SEQ ID NO: 131 - DNA, 464 bp, Homo sapiens
  misc_feature (397): n equals a,t,g, or c
  misc_feature (405): n equals a,t,g, or c
  misc_feature (420): n equals a,t,g, or c
  misc_feature (449): n equals a,t,g, or c
attcatctcgttcattgctacaccccgttagatcctcggcggtgccaggtttcgtcgaatggaaacccaaatgggtataagcgttccactttggcagcgttgctaaagcaaccaccaccagcgttggaacggttggctactaccaatttatggaccgcctattaagtggcatggttacagccaatacgatagtgagaaaaccaaaacgcagcctagtgagagtagaaagtgtaacaccattgcccacaactggttgctgcctactgtcgctaaggcggcttaggcaaaatttgctgcagcgtacgcggagagttgtttaccaaagatgccttacaaccctgcgctgaaagggggctgctgcttatgccaattatgttttaaggctggcttctggtanttttgccnaatggttttgatttnaggtttaccatttgttttccccaaattanccctttgcgcgcccg

SEQ ID NO: 132 - DNA, 1950 bp, Homo sapiens
  misc_feature (1941): n equals a,t,g, or c
ggggtggcttgccacccacagcaattgtgactttgaaaggccattccaccgttctatcaatccagctgcttcaggatgatgggcaacgtggtaagaccagtgaattccacgaacatgagcccactgctgcacttctatggccgtaaattaacttgagaaagtggaatcgaattccgatgttgaattttccttctggccccattcatgtggcaggtggtgattcaggattgtcctcccgggctggcagcagggccccagcggcaccatgtctgccctcggagtcaccgtggccctgctggtgtgggcggccttcctcctgctggtgtccatgtggaggcaggtgcacagcagctggaatctgcccccaggccctttcccgcttcccatcatcgggaacctcttccagttggaattgaagaatattcccaagtccttcacccggttggcccagcgcttcgggccggtgttcacgctgtacgtgggctcgcagcgcatggtggtgatgcacggctacaaggcggtgaaggaagcgctgctggactacaaggacgagttctcgggcagaggcgacctccccgcgttccatgcgcacagggacaggggaatcatttttaataatggacctacctggaaggacatccggcggttttccctgaccaccctccggaactatgggatggggaaacagggcaatgagagccggatccagagggaggcccacttcctgctggaagcactcaggaagacccaaggccagcctttcgaccccaccttcctcatcggctgcgcgccctgcaacgtcatagccgacatcctcttccgcaagcattttgactacaatgatgagaagtttctaaggctgatgtatttgtttaatgagaacttccacctactcagcactccctggctccagctttacaataattttcccagctttctacactacttgcctggaagccacagaaaagtcataaaaaatgtggctgaagtaaaagagtatgtgtctgaaagggtgaaggagcaccatcaatctctggaccccaactgtccccgggacctcaccgactgcctgctcgtggaaatggagaaggaaaagcacagtgcagagcgcttgtacacaatggacggtatcaccgtgactgtggccgacctgttctttgcggggacagagaccaccagcacaactctgagatatgggctcctgattctcatgaaataccctgagatcgaagagaagctccatgaagaaattgacagggtgattgggccaagccgaatccctgccatcaaggataggcaagagatgccctacatggatgctgtggtgcatgagattcagcggttcatcaccctcgtgccctccaacctgccccatgaagcaacccgagacaccattttcagaggatacctcatccccaagggcacagtcgtagtgccaactctggactctgttttgtatgacaaccaagaatttcctgatccagaaaagtttaagccagaacacttcctgaatgaaaatggaaagtttaagtacagtgactatttcaagccattttccacaggaaaacgagtgtgtgctggagaaggcctggctcgcatggagttgtttcttttgttgtgtgccattttgcagcattttaatttgaagcctctcgttgacccaaaggatatcgacctcagccctatacatattgggtttggctgtatcccaccacgttacaaactctgtgtcattccccgctcatgagtgtgtggaggacaccctgaaccccccgctttcaaacaagatttcgaattgtttgaggtcaggatttctcaaactgattcctttctttgcatatgagtatttgaaaataaatattttcccagaatataaataaatcatcacatgattattttaactawaaaaaaaaaaaaaaaaaaaaaaaaaaaaaaaaaaanaaaaaaaaa

SEQ ID NO: 133 - DNA, 2093 bp, Homo sapiens
cacgcgttcgcccacgcgtssgctgggtttctgaactgctgggtttctgcttgctcctctggagatgcagcgtctgttgactccagtgaagcgcattctgcaactgacaagagcggtgcaggaaacctccctcacacctgctcgcctgctcccagtagcccaccaaaggttttctacagcctctgctgtccccctggccaaaacagatacttggccaaaggacgtgggcatcctggccctggaggtctacttcccagcccaatatgtggaccaaactgacctggagaagtataacaatgtggaagcaggaaagtatacagtgggcttgggccagacccgtatgggcttctgctcagtccaagaggacatcaactccctgtgcctgacggtggtgcaacggctgatggagcgcatacagctcccatgggactctgtgggcaggctggaagtaggcactgagaccatcattgacaagtccaaagctgtcaaaacagtgctcatggaactcttccaggattcaggcaatactgatattgagggcatagataccaccaatgcctgctacggtggtactgcctccctcttcaatgctgccaactggatggagtccagttcctgggatggtcgttatgccatggtggtctgtggagacattgccgtctatcccagtggtaatgctcgtcccacaggtggggccggagctgtggctatgctgattgggcccaaggcctctggccctggagcgagggctgaggggaacccatatggagaatgtgtatgacttctacaaaccaaatttggcctcggagtacccaatagtggatgggaagctttccatccagtgctacttgcgggccttggatcgatgttacacatcataccgtaaaaaaatccagaatcagtggaagcaagctggcagcgatcgacccttcacccttgacgatttacagtacatgatctttcatacacccttttgcaagatggtccagaagtctctggctcgcctgatgttcaatgacttcctgtcagccagcagtgacacacaaaccagcttatataaggggctggaggctttcggggggctaaagctggaagacacctacaccaacaaggacctggataaagcacttctaaaggcctctcaggacatgttcgacaagaaaaccaaggcttccctttacctctccactcacaatgggaacatgtacacctcatccctgtacgggtgcctggcctcgcttctgtcccaccactctgcccaagaactggctggctccaggattggtgccttctcttatggctctggtttagcagcaagtttcttttcatttcgagtatcccaggatgctgctccaggctctcccctggacaagttggtgtccagcacatcagacctgccaaaacgcctagcctcccgaaagtgtgtgtctcctgaggagttcacagaaataatgaaccaaagagagcaattctaccataaggtgaatttctccccacctggtgacacaaacagccttttcccaggtacttggtacctggagcgagtggacgagcagcatcgccgaaagtatgcccggcgtcccgtctaaaggtgttctgcagatccatggaaagcttcctgggaaacgtatgctagcagagcttctccccgtgaatcatatttttaagatcccactcttagctggtaaatgaatttgaatcgacatagtagccccataagcatcagccctgtagagtgaggagccatctctagcgggcccttcattcctctccatgctgcaatcactgtcctgggcttatggtgctatggactaggggtcctttgtgaaagagcaagatggagcaatggagagaagacctcttcctgaatcactggactccagaaatgtgcatgcagatcagctgttgccttcaagatccagataaactttcctgtcatgtgttagaactttattattattaatattgttaaacttctgtgctgttcctgtgaatctccaaattttgtaccttgttctaagctaatatatagcaattaaaaagagagaaagaggaaaaaaaaaaaaactttggggggggcccggaccccaatt

SEQ ID NO: 134 - DNA, 729 bp, Homo sapiens
  misc_feature (646): n equals a,t,g, or c
  misc_feature (665): n equals a,t,g, or c
  misc_feature (725): n equals a,t,g, or c
gctcgtgccgaattcggcacgagtcggcacgaggtccaagggggtgtgtgttcacgggaatgctgagtaccagcccggttctccagtttattcctccaagtgccaggactgcgtgtgcacggacaaggtggacaacaacaccctgctcaacgtcatcgcctgcacccacgtgccctgcaacacctcctgcagccctggcttcgaactcatggaggcccccggggagtgctgtaagaagtgtgaacagacgcactgtatcatcaaacggcccgacaaccagcacgtcatcctgaagcccggggacttcaagagcgacccgaagaacaactgcacattcttcagctgcgtgaagatccacaaccagctcatctcgtccgtctccaacatcacctgccccaactttgatgccagcatttgcatcccgggctccatcacattcatgcccaatggatgctgcaagacctgcacccctcgcaatgagaccagggtgccctgctccaccgtccccgtcaccacggaggtttcgtacgccggctgcaccaagaccgtcctcatgaatcattgctccgggtcctgcgggacatttgtcatgtamtcggccaaggccaggccctggaccacagcttgctcctgctgcaaagaaganaaaaccagccagcgtgagntggtcctgactgcccaatggcggtcgctaacacacacctacaccacatcgagactgccantgcc

SEQ ID NO: 135 - DNA, 1189 bp, Homo sapiens
  misc_feature (5): n equals a,t,g, or c
  misc_feature (8): n equals a,t,g, or c
  misc_feature (17): n equals a,t,g, or c
  misc_feature (1160): n equals a,t,g, or c
  misc_feature (1175): n equals a,t,g, or c
gtaanacngacagtacngtacggaattcccgggtcgaacccacgcgtcctggggtgagagggtgacgcatgtgccctctggcagtctgctgctgtgtccagagtccgactccagctgggctgtaactgggcttggcccccgccttaggccccgccagcaggcgaagcagggagatgtcagactgctacacggagctggagaaggcagtcattgtcctggtggaaaacttctacaaatatgtgtctaagtacagcctggtcaagaacaagatcagcaagagcagcttccgcgagatgctccagaaagagctgaaccacatgctgtcggacacagggaaccggaaggctgcggataagctcatccagaacctggatgccaatcatgatgggcgcatcagcttcgatgagtactggaccttgataggcggcatcaccggccccatcgccaaactcatccatgagcaggagcagcagagcagcagctagagacccctttggccacaccttccaggcactggcctgatgccccgccctggtgctctccccaggctccctcctcagcctcctgcccacccagggccctttactctcttctccctccagaccttcctctgacccttgctgaactggggtccctttgtgagtgtctcagtctagaggtacctccctccctggggggtctcagctcctggagtcgcaggcccttggggcccctctgtgagatctcaatgctgtctggggaccctaagagttttctcacctgttcagtctcatctaaccttccaatgtctgatgttcctgccaaattcctgcctgattctgggtccgtcctgacctccaaaggtcagcttggtgcttgaggtctccctgctcttggtggcagtggtagcagcaacagcagcagcagcagcagcagcagcagcagagacctctccactttcccttagcccctctgctgggtagagaggcactttcagggacttccctccagctgcctcttcatctgggaatgagctaagcaaggctgagcctcctcctgttgcttgaaataatgatgatataaaggctggatttggagtttgtatcccctggtcctctgggatgctcattaaaaccttcccactccttggaaaaaaaaaaaaaaaaargcgggsggtttanaggatccaacttacntacccgtgcattgc

SEQ ID NO: 136 - DNA, 1466 bp, Homo sapiens
  misc_feature (2): n equals a,t,g, or c
  misc_feature (1291): n equals a,t,g, or c
cngcttagttcttccatttcacccttgcagccagctgttggccacggccctgccctctggtctgccgtgcatctccctgtgccctcttgctgcctgcctgtctgctgaggtaaggtgggaggagggctacagccacatcccaccccctcgtccaatcccataatccatgatgaaaggtgaggtcacgtggcctcccaggctgacttcccaacctacagcattgacgccaacttggctgtgaaggaagaggaaaggatctggccttgtggtcactggcatctgagccctgctgatggctggggctctcgggcatgcttgggagtgcagggggctcgggctgcctggcctggctgcacagaaggcaagtgctggggctcatggtgctctgagctggcctggaccctgtcaggatgggccccacctcagaaccaaactcactgtccccactgtggcatgagggcagtggagcaccatgtttgagggcgaagggcagagcgtttgtgtgttctggggagggaaggaaaaggtgttggaggccttaattatggactgttgggaaaagggttttgtccagaaggacaagccggacaaatgagcgacttctgtgcttccagaggaagacgagggagcaggagcttggctgactgctcagagtctgttctgacgccctgggggttcctgtccaaccccagcaggggcgcagcgggaccagccccacattccacttgtgtcactgcttggaacctatttattttgtatttatttgaacagagttatgtcctaactatttttatagatttgtttaattaatagcttgtcattttcaagttcattttttattcatatttatgttcatggttgattgtaccttcccaagcccgcccagtgggatgggaggaggaggagaaggggggccttgggcgctgcagtcacatctgtccagagaaattccttttgggactggaggcagaaaagcggccagaaggcagcagccctggctcctttcctttggcaggttggggaagggcttgcccccagccttaggatttcagggtttgactgggggcgtggagagagagggaggaacctcaataaccttgaaggtggaatccagttatttcctgcgctgcgagggtttctttatttcactcttttctgaatgtcaaggcagtgaggtgcctctcactgtgaatttgtggtgggcgggggctggaggagagggtggggggctggctccgtccctcccagccttctgctgcccttgcttaacaatgccggccaactggcgacntcacggttgcacttccattccaccagaatgacctgatgaggaaatcttcaatasgacgcaaagatcaatgcaaaaattgttctatctgaacatataactggagctcgtccaaaaagcacactacgacagaactggacgttcgcagcgtccattcaaagcagcctcctcatcaagt

SEQ ID NO: 137 - DNA, 140 bp, Homo sapiens
ggttcacctacggaaaccttgttacgacttttacttcctctagatagtcaagttcgaccgtcttctcagcgctccgccakggccgtgggccgaccccggcggggccgatccgarggcctcactaaaccatccaatcggta

SEQ ID NO: 138 - DNA, 4142 bp, Homo sapiens
gaggggagcgagcggcgctttgggggaggggtcgcgtaggcgcctcacctgaccctgcggccgtgcggttgctgctccggggcaggtctccttccaggccaggggcccggaatcatgtacataaagcaggtgattatccagggttttcgaagttacagagatcaaacaattgtagatcccttcagttcaaaacataatgtgattgtgggcagaaatggatctggaaaaagtaactttttttatgcaattcagtttgttctcagtgatgagtttagtcatcttcgtccagaacagcggttggctttattgcatgaaggtactggtcctcgtgttatttctgcttttgtggagattatttttgataattcagacaaccggttaccaatcgataaagaggaagtttcacttcgaagagttattggtgccaaaaargatcagtatttcttagacaagaagatggtcacgaaaaatgatgtgatgaacctccttgaaagcgctggtttttctcgaagcaatccttattatattgttaaacaaggaaagatcaaccagatggcaacagcaccagattctcagagattaaagctattaagagaagtagctggtactagagtgtatgacgaacgaaaggaagaaagcatctccttaatgaaagaaacagagggcaaacgggaaaaaatcaatgagttgttaaaatacattgaagagakattacatactctmgaggaagaaaaggaagaactagctcagtatcagaagtgggataaaatgagacgagccctggaatataccatttacaatcaggaacttaacgagactcgtgccaaacttgatgagctttctgctaagcgagagactagtggagaaaaatccagacaattaagagatgctcagcaggatgcaagagataaaatggaggatatcgaacgccaagttagagaattgaaaacaaaaatttcagctatgaaagaagaaaaagaacagcttagtgctgaaagacaagagcagattaagcagaggactaagttggagcttaaagccaaggatttacaagatgaactagcaggcaatagtgaacaaaggaaacgtttattaaaagagaggcagaagctgcttgaaaaaatagaagaaaagcagaaagaactggcagaaacagaacccaaattcaacagtgtgaaagagaaagaagaacgaggaattgctagattggctcaagctacccaggaaagaacggatctttatgcaaagcagggtcgaggaagccagtttacatcaaaagaagaaagggataagtggattaaaaaggaactcaagtctttagatcaggctattaatgacaagaaaagacagattgctgctatacataaggatttggaagacactgaagcaaataaagagaaaaatctggagcagtataataaactggaccaggatcttaatgaagtcaaagctcgagtagaagaactggacagaaaatattacgaagtaaaaaataagaaagatgaactmcaaagtgaaagaaactacttgtggagagaagagaatgcagaacagcaagcacttgctgctaaaagagaagatcttgaaaagaagcaacaacttcttagagcagcaacaggaaaggccattttaaatggaatagacagcataaacaaagtgctagaccacttccgtcgaaaaggaataaaccagcatgttcaaaatggctatcatggtattgtaatgaataactttgaatgtgaaccagctttctacacatgcgtggaagtcactgctggaaacaggttattttatcacattgttgattcagatgaagtcagcacgaagattttaatggagtttaataaaatgaatcttcctggagaggttacttttctgcctcttaacaagttagatgtcagggatacagcctatcctgaaaccaatgatgctattcctatgatcagcaaactgaggtacaatcccagatttgacaaagctttcaaacatgtgtttggaaagactcttatttgtcgtagcatggaagtttcaacccagctggcccgtgctttcactatggactgtattactttggaaggtgaccaagtcagccatcggggtgctctaactgggggttattatgacacaaggaagtctcgacttgaattgcaaaaagatgttagaaaagcagaagaagaactaggtgaacttgaagcaaagctcaatgaaaacctgcgcagaaatattgaaaggattaataatgaaattgatcagttgatgaaccaaatgcaacagatcgagacccagcaaaggaaatttaaagcatctagagatagcatattatcagaaatgaagatgctaaaagagaagaggcagcagtcagagaaaaccttcatgcctaagcaacgtagcttacagagtttggaggcaagcttgcatgctatggagtctaccagagagtcattgaaagcagaactgggaactgatttgctttctcaactgagtttggaagatcagaagagagtagatgcactgaatgatgagattcgtcaacttcagcaggaaaacagacagttgctaaatgaaagaattaaattagaaggtattattactcgagtagagacttatctcaatgagaatctgagaaaacgcttggaccaagtagaacaggaacttaatgagctgagagagacagaagggggtactgttctcacagccacaacatcagaacttgaagccatcaataaaagagtaaaagacactatggcacgatcagaagatttggacaattccattgataaaacagaagctggaattaaggagcttcagaagagtatggagcgctggaaaaatatggaaaaagaacatatggatgctataaatcatgatactaaagaactggaaaagatgacaaatcggcaaggcatgctattgaagaagaaagaagagtgtatgaagaaaattcgagaacttggatcacttccccaggaagcatttgaaaagtaccagacactgagcctcaaacagttgtttcgaaaacttgagcagtgcaacacagaattaaagaagtacagccatgttaacaaaaaggctttggrtcagtttgtaaatttctccgagcagaaagaaaagttaataaagcgtcaagaagagttagatakgggttacaaatcgatcatggaactgatgaatgtacttgaacttcggaaatatgaagctattcagttaactttcaaacaggtatctaagaacttcagtgaagtattccagaagttagtacctggtggcaaagctactttggtgatgaagaaaggagatgtggagggcagtcagtctcaagatgaaggagaagggagtggtgagagtgagaggggttctggctcacaaagcagtgtcccatcagttgaccagtttactggagttggaattagggtgtcatttacaggaaaacaaggtgaaatgagagaaatgcaacagctttcaggtggacagaaatccttggtagcccttgctctgatttttgccattcagaaatgtgacccggctccattttacttgtttgatgaaattgaccaggctctggatgctcagcacagaaaggctgtgtcagatatgattatggaacttgctgtacatgctcagtttattacaactacttttaggcctgaactgcttgagtcagctgacaaattctatggtgtaaagttcagaaataaggttagtcatattgatgtgatcacagcagagatggccaaagactttgtagaagatgataccacacatggttaattggaaaatactacctactggtttgggagatgtatatagtaatatgattctcatacccaggaactgtaaatttaaacctaaatatttggccaatagttttcagacttaaagcatcatagtccttttatatttgtctttgtattttataagatactctgtaatgtcatgtttgtactgatagtttaagaatttaatttcctgtacaactttttgtaaaatgttctgctcctattttaaatgttttgaaacatgctaaatattctttcctaattattttatcacttatactaccttttttatagcttcaattaaataatcggttttatgactaaaaaaaaaaaaaaaaaacysggsggggggcccggtacccaatt

SEQ ID NO: 139 - DNA, 1747 bp, Homo sapiens
  misc_feature (1659): n equals a,t,g, or c
  misc_feature (1704): n equals a,t,g, or c
aagactccatttcaaaaaaaaaaaaaaaaaaaaatccactcatataaaaggtgagctcagctcactggtccatttctcagtggcttctccatcctcatttgcaaacctcagagggataaggcagttgaacctgatgagcaagaattataacagcaaggaaacattaatgcttagaattctgagatccagcacaactcagtctgtgggagctcagctcgctgcccagggataggtatgacctatgtctgccttaggctgctgggagatgccattctccagtttcagaagcaggcagggcaaaggtcaagactgtggtattggggtcttttggctctgaaggatcctggaaccactgattttggtttattccctccagggtctaaagagaacaagaggtgctagctcttaccaaaacagatggtagagagagttgctggctatttaaaaagctctttcatctkttaattcacytcttcttttcacctctttaaccactcctcaggaacagaacacttctaggactgggggtcttttagctccataagcaagtgagcagatgggacaagttagtcttttctccctagaaacaaaggggatgcccagtggtttccctttgcttcccaacctaaaatttcaagtttaataaaatagcaattagcagaagtgaccaaattgggagataattatcagtcatgaggaaagacacagatttcggtcataaagaatgtaagggctataagtagaaactttctataacctaaatgatgttatagaattatttttgagcaggagcagaaagattaaatatgatcacttcatacttctaaatcagaaataggaagattaaaaccacagaacagtttgtgatttctattgctgtagctaggtatcttactctgtccactcttgttcaagtatctaactcttctggaaaccaaataggctttagaagagattatcctatattcctatcagtataatactaaaatgtaactttttaatcatctggtttttaaaagataaacagtttagcccatctctccagagagcaaacataggaatatgactcaggagcctcctagggcttatcatcagccctcacacccgcttccccctccaacccacagcctttgcttccaggtggcaggattactactttgcctcttcagcagcatctactctaggcatattgatcattttagacactgggagaagagaacctcaaactaggaggaaaagacagagcctccacttagttttgggaggggatggcagacagtcaaggagatgagcgtcctaaggcatgttgggatagggtcagatgcaccacccatggagaggtttgtcaacacaaagacatggaaggttagaggtttgtcaacaaaaagacatggaaggttaggtttgtcaacacaaagacatggaagattagaggtttgtcaacacaaagacacaggaagaatgggctgcagaagatttagatgttttccatttgggcacattttacttagctggagaactaggtttaaaacagcctgggtaggaaaattagaascaagctggatgcagtgggctccatgcctgttaatcccaacacttttgggaggttccaggcaggaaagatcacttgggcccaagaagtccaacctgccagcggancttaagattcacaccacttgcactcccaccctggggtttaattanaaccaaaacccttttctccgaaaaaaaaaaaaaaaaaaaaaaa

SEQ ID NO: 140 - DNA, 1240 bp, Homo sapiens
gcggacgcggctggaggcgcggcggcagggctgggcggcggcggcggcggcggtcatggaacgccaagaggagtctctgtccgcgcggccggccctggagaccgaggggctgcgcttcctgcacaccacggtgggctccctgctggccacctatggctggtacatcgtcttcagctgcatccttctctacgtggtctttcagaagctttccgcccggctaagagccttgaggcagaggcagctggaccgagctgcggctgctgtggaacctgatgttgttgttaaacgacaagaagctttagcagctgctcgactgaaaatgcaagaagaactaaatgcgcaagttgaaaagcataaggaaaaactgaaacaacttgaagaagaaaaaaggagacagaagattgaaatgtgggacagcatgcaagaaggaaaaagttacaaaggaaatgcaaagaagccccaggaggaagacagtcctgggccttccacttcatctgtcctgaaacggaaatcggacagaaagcctttgcggggaggaggttataacccgttgtctggtgaaggaggcggagcttgctcctggagacctggacgcagaggcccgtcatctggcggatgaggctaagaatcttgttagtgtcacttttgacattagcaagatgaacccttaaccctcgattcaattgccttacgcacgcttttcacagtgactagccaaggggaggtggggttgatttctgttcctaactacacctgcatatgtcagggctccagtcagcaaaaggtatagatgttgcctctaggcatgaggtcattggtcacattctacttggagacagtgattgcattcattgatttcatggttaattgctagttggtaggtaaaggcctctagatgattagcaatcttgataaaagaggcctagtaatgttcttttgaggttagaaatccttgctgctaggacagtctctgtgacaggttgcgttgaatgatgtcttccttatcaatggtgagcccaccagtgaggattactgatgtggacagttgatggggtttgtttctgtatatttatttttatgtacagaactttgtaaaaacgaaactatttaaaaaacaagaataacatttttagcatctttattcaaggagatttatggacttcaatttgtctatcaaacattaaatagctttttattacaacctccaaaaaaaaaaaaaaaaaaaaaaaaaaawaaacaa

SEQ ID NO: 141 - DNA, 671 bp, Homo sapiens
gtatcctgcaggtcccggtccggaattcccgggtctacccacgcgtccgcgtgcgcaaygtgccctgggaatttggcgacgtaattcccgactatgtgctgggccagagcacctgtgccctgttcctcagcctccgctaccacaacctgcacccagactacatccatgggcggctgcagagcctggggaagaacttcgccttgcgggtcctgcttgtccaggtggatgtgaaagatccccagcaggccctcaaggagctggctaagatgtgtatcctggccgactgcacattgatcctcgcctggagccccgaggaagctgggcggtacctggagacctacaaggcctatgagcagaaaccagcggacctcctgatggagaagctagagcaggacttcgtctcccgggtgactgaatgtctgaccaccgtgaagtcagtcaacaaaacggacagtcagaccctcctgaccacatttggatctctggaacagctcatcgccgcatcaagagaagatctggccttatgcccaggcctgggccctcagaaagcccggaggctgtttgatgtcctgcacgagcccttcttgaaagtaccctgatgaccccagctgccaaggaaacccccagtgtaataataaatcgtcctcccaggccaggcaaaaaaaaaaaaa

SEQ ID NO: 142 - DNA, 3265 bp, Homo sapiens
  misc_feature (3234): n equals a,t,g, or c
  misc_feature (3256): n equals a,t,g, or c
ggcaccgtggacattgagagcctgacgggctaccgcacctaccgctgtgcccaccccctggccacactcttcaagatcctggcgtccttctacatcagcctagtcatcttctacggcctcatctgcatgtatacactgtggtggatgctacggcgctccctcaagaagtactcgtttgagtcgatccgtgaggagagcagctacagcracatccccgacgtcaagaacgacttcgccttcatgctgcacctcattgaccaatacgacccgctctactccaagcgcttcgccgtcttcctgtcggargtgagtgagaacaagctgcggcagctgaacctcaacaacgagtggacgctggacaagctccggcagcggctcaccaagaacgcgcaggacaagctggagctgcacctgttcatgctcagtggcatccctgacactgtgtttgacctggtggagctggaggtcctcaagctggagctgatccccgacgtgaccatcccgcccagcattgcccagctcacgggcctcaaggagctgtggctctaccacacagcggccaagattgaagcgcccgcgctggccttcctgcgcgagaacctgcgggcgctgcacatcaagttcaccgacatcaaggagatcccgctgtggatctatagcctgaagacactggaggagctgcacctgacgggcaacctgagcgcggagaacaaccgctacatcgtcatcgacgggctgcgggagctcaaacgcctcaaggtgctgcggctcaagagcaacctaagcaagctgccacaggtggtcacagatgtgggcgtgcacctgcagaagctgtccatcaacaatgagggcaccaagctcatcgtcctcaacagcctcaagaagatggcgaaacctgactgagctggagctgatccgctgtgacctggagcgcatcccccactccatcttcagcctccacaacctgcaggagattgacctcaaggacaacaacctcaagaccatcgaggagatcatcagcttccagcacctgcaccgcctcacctgccttaagctgtggtacaaccacatcgcctacatccccatccagatcggcaacctcaccaacctggagcgcctctacctgaaccgcaacaagatcgagaagatccccacccagctcttctactgccgcaagctgcgctacctggacctcagccacaacaacctgaccttcctccctgccgacatcggcctcctgcagaacctccagaacctagccatcacggccaaccggatcgagacgctccctccggagytcttccagtgccggaagctgcgggccctgcacctgggcaacaacgtgctgcagtcactgccctccagggtgggcgagctgaccaacctgacgcagatcgagctgcggggcaaccggctggagtgcctgcctgtggagctgggcgagtgcccactgctcaagcgcaggcttggtggtggaggaggacctgttcaacacactgccacccgaggtgaaggagcggctgtggagggctgacaaggagcaggcctgagcgaggccggcccagcacagcaagcagcaggaccgctgcccagtcctcaggcccggagggcaggcctagcttctcccagaactcccggacagccaggacagcctcgtggctgggcaggagcctggggccgcttgtgagtcaggccagagcgagaggacagtatctgtggggctggccccttttctccctctgagactcacgtcccccagggcaagtgcttgtggaggagagcaagtctcaagagcgcagtatttggataatcagggtctcctccctggaggccagctctgccccaggggctgagctgccaccagaggtcctgggaccctcactttagttcttggtatttatttttctccatctcccacctccttcatccagataacttatacattcccaagaaagttcagcccagatggaaggtgttcagggaaaggtgggctgccttttccccttgtccttatttagcgatgccgccgggcatttaacacccacctggacttcagcagagtggtccggggcgaaccagccatgggacggtcacccagcagtgccgggctgggctctgcggtgcggtccacgggagagcaggcctccagctggaaaggccaggcctggagcttgcctcttcagtatttgtggcagttttagttttttgtttttttttttttaatcaaaaaacaatttttttaaaaaaaaaaagctttgaaaatggatggtttgggtattaaaaagaaaaaaaaaacttaaaaaaaaaaagacactaacggccagtgagttggagtctcagggcagggtggcagtttcccttgagcaaagcagccagacgttgaactgtgtttcctttccctgggcgcagggtgcagggtgtcttccggatctggtgtgaccttggtccaggagttctatttgttcctggggagggaggtttttttgtttgttttttgggtttttttggtgtcttgttttctttctcctccatgtgtcttggcaggcactcatttctgtggctgtcggccagagggaatgttctggagctgccaaggagggaggagactcgggttggctaatccccggatgaacggtgctccattcgcacctcccctcctcgtgcctgccctgcctctccacgcacagtgttaaggagccaagaggagccacttcgcccagactttgtttccccaccgcctgcggcatgggtgtgtccagtgccaccgctggcctccgctgcttccatcagccytgtcgccacctggtccttcatgaagagcagacacttagaggctggtcgggaatggggaggtcgcccctgggagggcaggcgttggttccaagccggttcccgtccctggcgcctggagtgcacacagcccagtcggcacctggtggctggaagccaccctgctttagatcactcgggtccccaccttagaagggtccccgccttagatcaatcacgtggacactaaggcacgttttagagtctcttgtcttaatgattatgtccatccgtctgtccgtccatttgtgttttctgcgtcgtgtcattggatataatcctcagaaataatgcacactagcctctgacaaccatgaagcaaaaatccgttacatgtgggtctgaacttgtagactcggtcacagtatcaaataaaatctataacagaaaaaaaaaaaaaagggngccgtctaaagatcaacttctnccttgatca

SEQ ID NO: 143 - DNA, 765 bp, Homo sapiens
gcccacgcgtccgcccacgcgtccgcggacgcgtggggggtgacattgagctcaccagcgccaccgtccccggcgaagttctgcgctggtcggcggagtagcaagtggccatggggagcctcagcggtctgcgcctggcagcaggaagctgttttaggttatgtgaaagagatgtttcctcatctctaaggcttaccagaagctctgatttgaagagaataaatggattttgcacaaaaccacaggaaagtcccggagctccatcccgcacttacaacagagtgcctttacacaaacctacggattggcagaaaaagatcctcatatggtcaggtcgcttcaaaaaggaagatgaaatcccagagactgtctcgttggagatgcttgatgctgcaaagaacaagatgcgagtgaagatcagctatctaatgattgccctgacggtggtaggatgcatcttcatggttattgagggcaagaaggctgcccaaagacacgagactttaacaagcttgaacttagaaaagaaagctcgtctgaaagaggaagcagctatgaaggccaaaacagagtagcagaggtatccgtgttggctggattttgaaaatccaggaattatgttataacgtgcctgtattaaaaaggatgtggtatgaggatccatttcataaagtatgatttgcccaaacctgtaccatttccgtatttctgctgtagaagtagaaataaattttcttaaataaaaaaaaaaaaaaaaaactcgag

SEQ ID NO: 144 - DNA, 1694 bp, Homo sapiens
gcccacgcgtccgggttgctctattattattattattattatttgcctttttttaatcaccatttatttgtgtaatctttctccattgattggctgtcattcttataatatctgaactaccccataaaataattctctgacttaaaggcatttagcttttgcttatcgtttttacatcctctattcaactaagacactgtcttgagagttattttttccagatggatcgttggcctaaattttcacacttctcccctgttcatcctttttcctcttccctgcttcctgggaataaaaggaacttttttaaaaaaattaattagtccacaggwctmattatctttctttatgattaatctatgactttttggtacaagaacaatggaaaaagtgaattaaggtaatgaacaaaacctttcacccacttaaacattttccagttttgagattcctcttcgtgtttgtggtgtcttccccttgttaccccttctgccctttttctctgactatggtaatttggtctttaggctcatatcagtctccccgagacattctgcagtcattatcacctttttgggtggattttattttgttttattttgttttttttaaaaaaataactttttaacattggtgcatatttgcttgggatagagcttgtgtaatttaccaatcgtattgattgtaagtgattgtgccctgcagaggtatatttaacaagacaaaaataatcttggttaataaaggagcccatgagatttgagtcaggttgtaagtgaaatcacttacacttttggatagaatttatactcctgctcttataaatcagtggtagacttaccattttttaaagttttcttgcatttttttgtttttttattgccacagctccctattctttcttgcctgcctccacccccctgttcaggaaaaaaaaaaattgagccttaaagtgacagctgattttttaattgctgaattttgtgaaattttactttttccaagtgtttccaactttaaaaagagaagtgaagacaaataggttggaatggtgaagacaaatggrttggratttcacaggctgtgaataattccttaggatctggcaaaccgtgaagtcttatttgaagaccttatctcctgagagttcttttggagtaggaaaaagaaccctatttgaaatagaccgtttttctcttgtttttaatctgtttaatatttctgatttttaagcagctttcaaaacaagtgtggtggaaaaaaagaaatagtagtaggaagatgtttagggcagcagaactctgggtctaaataagtacatgttcccacttgttgccgatttttgagagtactagggccatctttctcaattttgtattatttgtgtgcatgtttatatcaaagatgcccattttgttaaaatgctatttcctttattaccttggaaactgactcagcctcatgttgctcctaattagtgtttaaggctcccatgagttgcagataaaatgatttattttaacaagtagaaggaggtgattcaccttttggattgtaaatatatgaaaatgtctacaaggtctttatctgctttctgtcagcatttatattaaatgataaattaatgaggaaaaaaaaaaaaaaaaaaaaaaaaaaaaaaaaaaaaaaaaaaaaaaaaaaaaaaaagggcggcc

SEQ ID NO: 145 - DNA, 823 bp, Homo sapiens
  misc_feature (182): n equals a,t,g, or c
  misc_feature (731): n equals a,t,g, or c
  misc_feature (743): n equals a,t,g, or c
  misc_feature (749): n equals a,t,g, or c
  misc_feature (755): n equals a,t,g, or c
  misc_feature (817): n equals a,t,g, or c
  misc_feature (821): n equals a,t,g, or c
tgtcacagactacttcatcagtcgcttatctggagctgggaccaaggtttctgccaggccttgggatcagctcttgggggtcagagcagccttcccacatcctctggcactgctgaacttttgcagcagctctttcctcctctyttggatgcccttcgagagcccaggttacgacggatttnctgccagcctgcagatcctgcgcctgtcgccctgcaggtctctgtacccttcagaccaccttgctctggttcctgggcagagctcagcagtacttggcagcatgggacccagcttccttcctgctcctgatccaaaaggacttacctcctctgttgcatgaggcagaagctttgtatagcctggcctcagaggaaagcttagctctggaagtggagcagcagctgggcctggagatccagaagctgactgcacagatccagctcctgcctgaagagtcactaagtgtcttttctcaagaatgtcataaacaagccatgcaaggtttcaagctctacatgccacggggtcggtactggcggcttcgtctctgtcctgaacctcccagtgctcctagtgagtatgctggtttagtggtccgcaccgtactggagcctgtgttgcaaggattgcaagggttgcacctcaagcccaggcccctgcccttggtcaggctctgacggscatcgtgggtgcctggcttgaccacattcttacccatgggattcggnttcaacctgcanggagcnctkcancttaaacaagactttggaatggtcaggagtttgtggaaaagagcatggacctgtccctgatntcgnca

SEQ ID NO: 146 - DNA, 1134 bp, Homo sapiens
caaaagcatagagaaattataaaattcaagaacagatgttagaatggaaactgatctagaggttataataaaggataatagtcttgtgctgacaccatcacacatcaaagcctacatgttgatgactcttcaaggattagaatatttacatcaacattggatcctacatagggatctgaaaccaaacaacttgttgctagatgaaaatggagttctaaaactggcagattttggcctggccaaatcttttgggagccccaatagagcttatacacatcaggttgtaaccaggtggtatcgggcccccgagttactatttggagctaggatgtatggtgtaggtgtggacatgtgggctgttggctgtatattagcagagttacttctaagggttccttttttgccaggagattcagaccttgatcagctaacaagaatatttgaaactttgggcacaccaactgaggaacagtggccggacatgtgtagtcttccagattatgtgacatttaagagtttccctggaatacctttgcatcacatcttcagtgcagcaggagacgacttactagatctcatacaaggcttattcttatttaatccatgtgctcgaattacggccacacaggcactgaaaatgaagtatttcagtaatgcgccagggccaacacctggatgtcagctgccaagaccaaactgtccagtggaaaccttaaaggagcaatcaaatccagctttggcaataaaaaggaaaagaacagaggccttagaacaaggaggattgcccaagaaactaattttttaaagagaacactggacaacattttactactgagggaaatagccaaaaaggcaaataatggaaaaatagtaaacattaagtaaatgctgtagaagtgagtttgtaaatattctacacatgtaaaatatgtaaaactatgggttatttttattaaatgtattttaaaataaaaatttaattctggtttttctgattagagtgcmaaagtgagaaaagttcaatactcttgaatgtagaattgaaaatgcattagggaaaacttaataaaaattattaccagttatttggaagatctgacccatatagtatcacaaatctgtagtagcatgggt

SEQ ID NO: 147 - DNA, 1486 bp, Homo sapiens
gcggacgcgtggggggcggggtgtcgtttcctttcgctgatgcaagagcctagtgcggtggtgggagaggtatcggcaggggcagcgctgccgccggggcctggggctgacccgtctgacttcccgtccgtgccgagcccactcgagccgcagccatgtctggggacgagatgatttttgatcctactatgagcaagaagaaaaagaagaagaagaagccttttatgttagatgaggaaggggatacccaaacagaggaaacccagccttcagaaacaaaagaagtggagccagagccaactgaggacaaggatttggaagctgatgaagaggacactaggaaaaaagatgcttctgatgatctagatgacttgaacttctttaatcaaaagaaaaagaagaaaaaaactaaaaagatatttgatattgatgaagctgaagaaggtgtaaaggatcttaagattgaaagtgatgttcaagaaccaactgaaccagaggatgaccttgacattatgcttggcaataaaaagaagaaaaagaagaatgttaagttcccagatgaggatgaaatactagagaaagatgaagctctagaagatgaagacaacaaaaaagatgatggtatctcattcagtaatcagacaggccctgcttgggcaggctcagaaagagactacacatacgaggagctgctgaatcgagtgttcaacatcatgagggaaaagaatccagatatggttgctggggagaaaaggaaatttgtcatgaaacctccacaagtcgtccgagtaggaaccaagaaaacttcttttgtcaactttacagatatctgtaaactattacatcgtcagcccaaacatctccttgcatttttgttggctgaattgggtacaagtggttctatagatggtaataaccaacttgtaatcaaaggaagattccaacagaaacagatagaaaatgtcttgagaagatatatcaaggaatatgtcacttgtcacacatgccgatcaccggacacaatcctgcagaaggacacacgactctatttcctacagtgcgaaacttgtcattctagatgttctgttgccagtatcaaaaccggcttccaggctgtcacgggcaagcgagcacagctccgtgccaaagctaactaatttgctaatcactgattttgcaaagcttgttgtggagatgtggctggacaggtttgccatcagagtggatataccgttgtattaaaaacaagataaaaaagctgccaagatttttggcgagtggttggtctgaagtccttgcaagacgctgatgctcaagctgttgacatactcattgcctactttaacacctgtcagagaaacgtgatatggggtaaggaggtgcttttttaaaatcgttcatagacttctgtaaaatgcaagataaattaaagttattataacagtgataaaaaaaaaaaaaaaaaaaaaaaaaaaaaaaaaaaaaa

SEQ ID NO: 148 - DNA, 153 bp, Homo sapiens
cgcctgtgcagcgcaagatcgaggctcgctcggcagaggactccttcacaggcttcgtccggaccctgtactttgctgacacctacctgaaggagtgccaaggctgagcggccaggcctccagaacatggagctggcgcctgtgcagcgcaag

SEQ ID NO: 149 - DNA, 882 bp, Homo sapiens
  misc_feature (14): n equals a,t,g, or c
  misc_feature (25): n equals a,t,g, or c
  misc_feature (870): n equals a,t,g, or c
acgaagggcaaagntggtgtcaccncggtgcgccgtctagactagtggatcccggctcaggattcgcacgtgcctcctggtctcagtatggcgctgtcctgggttcttacagtcctgagcctcctacctctgctggaagcccagatcccattgtgtgccaacctagtaccggtgcccatcaccaacgccaccctggaccrgatcactggcaagtggttttatatcgcatcggcctttcgaaacgaggagtacaataagtcggttcaggagatccaagcaaccttcttttacttcacccccaacaagacagaggacacgatctttctcagagagtaccagacccgacaggaccagtgcatctataacaccacctacctgaatgtccagcgggaaaatgggaccatctccagatacgtgggaggccaagagcatttcgctcacttgctgatcctcagggacaccaagacctacatgcttgcttttgacgtgaacgatgagaagaactgggggctgtctgtctatgctgacaagccagagacgaccaaggagcaactgggagagttctacgaagctctcgactgcttgcgcattcccaagtcagatgtcgtgtacaccgattggaaaaaggataagtgtgagccactggagaagcagcacgagaaggagaggaaacaggaggagggggaatcctagcaggacacagccttggatcaggacagagacttggggccatcctgcccctccaacccgacatgtgtacctcagctttttccctcacttgcatcaataaagcttctgtgtttggaacagctaaaaaaaaaaaaaaaaaaaaaaaaaaaaactcgagggggggcccgkaacccaatcgcntgatattattag

SEQ ID NO: 150 - DNA, 1508 bp, Homo sapiens
  misc_feature (126): n equals a,t,g, or c
  misc_feature (155): n equals a,t,g, or c
ctaaggaggggtgaaccggcccaggtcggaaacggagcaggtcaaaactcccgtgctgaggtgggaggatcgcttgagcccaggagttctgggctgtagtgcgctatgccgatcgggtgtccgcantctagccttggcaacagtgcaagactgtntcaaaaacagcaacagaragcaggacgtgagacttctacctgctcactcagaatcatttctgcaccaaccatggccacgtttgtggagctcagtaccaaagccaagatgcccattgtgggcctgggcacttggaagtctcctctcggcaaagtgaaagaagcagtgaaggtggccattgatgcaggatatcggcacattgactgtgcctatgtctatcagaatgaacatgaagtgggggaagccatccaagagaagatccaagagaaggctgtgaagcgggaggacctgttcatcgtcagcaagttgtggcccactttctttgagagaccccttgtgaggaaagcctttgagaagaccctcaaggacctgaagctgagctatctggacgtctatcttattcactggccacagggattcaagtctggggatgaccttttccccaaagatgataaaggtaatgccatcggtggaaaagcaacgttcttggatgcctgggaggccatggaggagctggtggatgaggggctggtgaaagcccttggggtctccaatttcagccacttccagatcgagaagctcttgaacaaacctggactgaaatataaaccagtgactaaccaggttgagtgtcacccatacctcacgcaggagaaactgatccagtactgccactccaagggcatcaccgttacggcctacagccccctgggctctccggatagaccttgggccaagccagaagacccttccctgctggaggatcccaagattaaggagattgctgcaaagcacaaaaaaaccgcagcccaggttctgatccgtttccatatccagaggaatgtgattgtcatccccaagtctgtgacaccagcacgcattgttgagaacattcaggtctttgactttaaattgagtgatgaggagatggcaaccatactcagcttcaacagaaactggagggcctgtaacgtgttgcaatcstctcatttggaagactatcccttcgatgcagaatattgaggttgaatctcctggtgagattatacaggagattctctttcttcgctgaagtgtgactacctccactcatgtcccattttagccaagcttatttaagatcacagtgaacttagtcctgttatagacgagaatcgaggtgctgttttagacatttatttctgtatgttcaactaggatcagaatatcacagaaaagcatggcttgaataaggaaatgacaattttttccacttatctgatcagaacaaatgtttattaagcatcagaaactctgccaacactgaggatgtaaagatcaataaaaaaaataataatcataaaaaaaaaaaaaaa

SEQ ID NO: 151 - DNA, 1232 bp, Homo sapiens
  misc_feature (1): n equals a,t,g, or c
  misc_feature (7): n equals a,t,g, or c
  misc_feature (1213): n equals a,t,g, or c
  misc_feature (1217): n equals a,t,g, or c
naactgngctagcatgcccagcccacagagagcctccactagagtgatgctaagtggaaatgtgaggtgcagctgccacagagggcccccaccagggaaatgtctagtgtctagtggatccaggccacaggagagagtgccttgtggagcgctgggagcaggacctgaccaccaccaggactccagcctgggtgacagggtgaacgccatctcaaaaaataaaaattaaaaaataaaaaaagaacctggatctcaatttaatttttcatattcttgcaatgaaatggacttgaggaagctaagatcatagctagaaatacagataattccacagcacatctctagcaaatttagcctattcctattctctagcctattccttaccacctgtaatcttgaccatataccttggagttgaatattgttttcatactgctgtggtttgaatgttccctccaacactcatgttgagacttaatccctaatgtggcaatactgaaaggtggggcctttgagatgtgattggatcgtaaggctgtgccttcattcatgggttaatggattaatgggttatcacaggaatgggactggtggctttataagaagaggaaaagagaactgagctagcatgcccagcccacagagagcctccactagagtgatgctaagtggaaatgtgaggtgcagctgccacagagggcccccaccagggaaatgtctagtgtctagtggatccaggccacaggagagagtgccttgtggagcgctgggagcaggacctgaccaccaccaggaccccagaactgtggagtcagtggcagcatgcagcgcccccttgggaaagctttaggcaccagcctgcaacccattcgagcagccacgtaggctgcacccagcaaagccacaggcacggggctacctgaggccttgggggcccaatccctgctccagtgtgtccgtgaggcagcacacgaagtcaaaagagattattctcttcccacagataccttttctctcccatgaccctttaacagcatctgcttcattcccctcaccttcccaggctgatctgaggtaaactttgaagtaaaataaaagctgtgtttgagcatcaaaaaaaaaaaaaaaaaaaaaaaaaaaaaaaaaaaaaaaaaaaaaaaaaaaaaaaaaaaaaaaaaaaaaaaaaaaaaaaaaaaaaaaaaaaaaaaaaaangggnggccgttttaaagga

SEQ ID NO: 152 - DNA, 999 bp, Homo sapiens
  misc_feature (917): n equals a,t,g, or c
  misc_feature (951): n equals a,t,g, or c
  misc_feature (995): n equals a,t,g, or c
gcgcagctccgccggcgcctggtcccagcgcccgcggcgccgcgtccccggcccaaccatggcrtcctccgcggccggctgcgtggtgatcgttggcagtggagtcattgggygaagctgggccatgctgtttgccagtggaggcttccaggtgaaactctatgacattgagcaacagcagataaggaaygccctggaaaacatcagaaaggagatgaagttgctggagcaggcaggttctctgaaaggctccctgagtgtggaagagcagctgtcactcatcagtggttgtcccaatatccaagaagcagtagagggygccatgcwcatycwgtgaatccgccatactacatcccgctggttgagctggtcccccacccggagacggcccctacgacagtggacagaacccacgccctgatgaagaagattggacagtgccccatgcgagtccagaaggaggtggccggcttcgttctgaaccgcctgcaatatgcaatcatcagcgaggcctggcggctagtggaggaaggaatcgtgtctcctagtgacctggaccttgtcatgtcagaagggttgggcatgcggtatgcattcattggacccctggaaaccatgcatctcaatgcagaaggtatgttaagctactgcgacagatacagcgaaggcataaaacatgtcctacagacttttggacccattccagagttttccagggccactgctgagaaggttaaccaggacatgtgcatgaaggtccctgatgacccggagcacttagctgccaggaggcagtggagggacgagtgcctcatgagactcgccaagttgaaragtcaagtgcagmyaasctggaratttccaccttttcttttcagcttgattgcatttgactatattttacagccagtgattgnagtttcatggtaatatgtggcaaaatatttttgnaattattttctaatccctttcttaagtactctggggccctgcanttat

SEQ ID NO: 153 - DNA, 1212 bp, Homo sapiens
  misc_feature (794): n equals a,t,g, or c
  misc_feature (1047): n equals a,t,g, or c
  misc_feature (1146): n equals a,t,g, or c
  misc_feature (1176): n equals a,t,g, or c
cacgcccacctctctcctggagcgctgggccttcgctggccgcaccggcagccatgagctcggagatggagccgctgctctgggcctggagctattttaggcgcaggaagttccagctctggccgatctatgcacgcagatgctggagaagtccccttatgaccaggcggctgctgcagatgggcatttataacggccagctttttaacaatctggggctgtgttgcttctatgcccagcagtatgatatgactctgacctcatttgaacgtgccctttctttggctgaaaatgaagaagaggcagctgatgtctggtacaacttgggacatgtagctgtgggaataggagatacaaatttggcccatcagtgcttcaggctggctctggtcaacaacaacaaccacgccgaggcctacaacaacctggctgtgctggagatgcggaagggccacgttgaacaggcaagggcactattacaaactgcatcatcattagcaccccatatgtatgaaccgcattttaattttgcaacaatctctgataagattggagatctgcagagaagctatgttgctgcgcagaagtctgaagcagcatttccagaccatgtggacacacaacatttaattaaacaattaaggcagcattttgctatgctctgattgttccttagaccacatatgttcttatgaagcmgcattatgcaaggggaaaaaagcactatgtctgtgtatgtatgtatatagtgtaatacgtatattttaacaaacctgtccttgatattagttaanggtgacacataagggtgacacagaatgtgtaatgcaaatttcatagtaatagtaactttataaaataatattataaaatacaggatttaaacctttctaaatagatcctgaaactgtctctcacattatatagtagatgtttgtttataatgtttacaaaacattttggtgaatttcctcaatgttttataaatgtacattttttaagtccttaagctgactcttagccatcatgtagcttaaggagtctggnaatctggccattgaaaactggcacctttgaagccaggtgtggttagcatgtgcctatagtcccagcttacttggggaggtgggaggtggggagggattnatgaaattaggaggacttttccctttaagnacttttaaaaaaatggtattttgaaaacctattttt

SEQ ID NO: 154 - DNA, 2361 bp, Homo sapiens
  misc_feature (92): n equals a,t,g, or c
ggagccttgccttgctgctctacctccaccatgccaagtggtcccaggctgcacccatggcagaaggaggagggcagaatcatcacgaaggntgaagttcatggatgtctatcagcgcatactgccatccaatcgagaccctggtggacatcttccaggagtaccctgatgagatcgagtacatcttcaagccatcctgtgtgcccctgatgcgatgcgggggctgctgcaatgacgagggcctggagtgtgtgcccactgaggagtccaacatcaccatgcagattatgcggatcaaacctcaccaaggccagcacataggagagatgagcttcctacagcacaacaaatgtgaatgcagaccaaagaaagatagagcaagacaagaaaaatgtgacaagccgaggcggtgagccgkgcaggaggaaggagcctccctcagggtttcgggaaccagatctctcaccaggaaagactgatacagaacgatcgatacagaaaccacgctgccgccaccacaccatcaccatcgacagaacagtccttaatccagaaacctgaaatgaaggaagaggagactctgcgcagagcactttgggtccggagggcgagactccggcggaagcattcccgggcgggtgacccagcacggtccctcttggaattggattcgccattttatttttcttgctgctaaatcaccgagcccggaagattagagagttttatttctgggattcctgtagacacacccacccacatacatacatttatatatatatatattatatatatataaaaataaatatctctattttatatatataaaatatatatattctttttttaaattaacagtgctaatgttattggtgtcttcactggatgtatttgactgctgtggacttgagttgggaggggaatgttcccactcagatcctgacagggaagaggaggagatgagagactctggcatgatcttttttttgtcccacttggtggggccagggtcctctcccctgcccaggaatgtgcaaggccagggcatgggggcaaatatgacccagttttgggaacaccgacaaacccagccctggcgctgagcctctctaccccaggtcagacggacagaaagacagatcacaggtacagggatgaggacaccggctctgaccaggagtttggggagcttcaggacattgctgtgctttggggattccctccacatgctgcacgcgcatctcgcccccaggggcactgcctggaagattcaggagcctgggcggccttcgcttactctcacctgcttctgagttgcccaggagrccactggcagatgtcccggcgaagagaagagacacattgttggaagaagcagcccatgacagctccccttcctgggactcgccctcatcctcttcctgctccccttcctggggtgcagcctaaaaggacctatgtcctcacaccattgaaaccactagttctgtccccccaggagacctggttgtgtgtgtgtgagtggttgaccttcctccatcccctggtccttcccttcccttcccgaggcacagagagacagggcaggatccacgtgcccattgtggaggcagagaaaagagaaagtgttttatatacggtacttatttaatatccctttttaattagaaattaaaacagttaatttaattaaagagtagggttttttttcagtattcttggttaatatttaatttcaactatttatgagatgtatcttttgctctctcttgctctcttatttgtaccggtttttgtatataaaattcatgtttccaatctctctctccctgatcggtgacagtcactagcttatcttgaacagatatttaattttgctaacactcagctctgccctccccgatcccctggctccccagcacacattcctttgaaataaggtttcaatatacatctacatactatatatatatttggcaacttgtatttgtgtgtatatatatatatatatgtttatgtatatatgtgattctgataaaatagacattgctattctgttttttatatgtaaaaacaaaacaagaaaaaatagagaattctacatactaaatctctctccttttttaattttaatatttgttatcatttatttattggtgctactgtttatccgtaataattgtggggaaaagatattaacatcacgtctttgtctctagtgcagtttttcgagatattccgtagtacatatttatttttaaacaacgacaaagaaatacagatatatcttaaaaaaaaaaaagcattttgtattaaagaatttaattctgatctcaaaaaaaaaaaaaaaaaaaagggggg

SEQ ID NO: 155 - DNA, 1831 bp, Homo sapiens
aaaggtgagaatgcacaaagacagctctgggttgggtaccacagttttgcttggtagaaagaaaccagtgtaggaaaggagacgccaccagacatcttcaacagacaagattctttctgcctttttcaaaagatgctctctgcagcagtaagactatagatagagttgattggaatatcatgtgacccagtatgctactgctaggcataattatcaaaaattcatttttctcattaaatattgttaattgctcgccacataaagagaagctagagctcaccagtcttggtggtgtcctagaccttcctctaaagcagtcttgggaagctggatcatcagwtctttagcctagacagagtgtcgctggtaaataaaggagacacaggtaacccagagtggacagtgatttgcgtggggagwcacagtggatctggggcctctgatactttgyttcckaaaacagcccccagttttcggcttgcctatgagatgatgttcatgtgcttccttgaaaccaggtggaaagaaaggggaagaattaattttctcattctgttgctgttgaacgtaatgtaatcttaatactgtagccttcctagaagcccttccctctttttcatgctgtaaagtcaaatatttgatatccttaacataaattttaaaaattaaggtcattaggragcaaatgtctatttccaaagcaatgagcttgttgtgactgtgattttattcttctatagtatttttttcctcattttaactgagaggagaaaataatactcttttgcaatatccttaggttctccccttccccctggtgccccttctagtgtcttaagactttgtcttaacaagtataacattacattttgttgttaaaacctttcgaaactgtattcagtgattcttccaagtttatctgctctgcactatttcactaataaaccctggctaccacgtagcccttgatctccaagtagtttacctatgcaagacctgtgacactctgaattcacttctctttctttcagaaagtagtcataaatggagcttaattataaaggtaaaacttgtctccaaccagtttcattttggccatttctttttcaaaatgtcagctgttttcctccaagatttttcaccaaaacaatgatcataagtgctggaatatataatactttgcaggcataaaataacccagacatactctcatatttctttggtgtattttggttggtaaaacttaccagcattaaatgtaaaatataatgaggagttaattccttacctagaactatttcttccttttaagattcataagtaaccttttatttttacagagctacgtataacttccacattacagtcagggacctgaggtgtaacttactaagtgaaccccaaggttattttatcttgcaaaagaaacctaaaccaaactaagggccttacagtttatggttagactgaatcaaaagctataacctcaatttttccaaaaacagcttctgactgcaaaagcaagtcatacagttgttaggtatgaaatagcactgatcaggaaatgcatcttcgcagatggtatttccttcagaaaagacttttctacttttaatataaattaagccataacagtttcatgctgtggaaagagggtgaaaaggttcattttaagagattatataatatgaactttcacatttactgtgaaatgtctaactttgccagtgcttcagcaagtttttttgggggggtgatgggggaggggtagtattgggttttwggaggktttccaaatctgtggaactttgggagaggggacagttgttgg

SEQ ID NO: 156 - DNA, 1186 bp, Homo sapiens
  misc_feature (1045): n equals a,t,g, or c
  misc_feature (1078): n equals a,t,g, or c
  misc_feature (1118): n equals a,t,g, or c
  misc_feature (1134): n equals a,t,g, or c
ggcacgagcgggcctggccgaggttcgggctccgttggccgaggggggcgtacggaggtggcagctgtgggaggaggcggcgtggaaggccgaggagctcaagcccggaccaatccccacgttccgggccgcgaccctgaccctgcagcgtaccgggaagcgaaaccggccggatgggccgctgagcccgaatcgggcactgtgtggagccccctggagctgagatcaggatgttccgcttcatgagggacgtggagcctgaggatcccatgttcctgatggatccctttgctattcaccgtcagcatatgagccgtatgttgtcaggtggctttggatatagccccttcctcagcatcacagatggcaacatgccagggaccaggcctgccagccgccggatgcagcaggctggagctgtctccccctttgggatgctgggaatgtcgggtggtttcatggacatgtttgggatgatgaatgacatgattggaaacatggaacacatgacagctggaggcaattgccagaccttctcatcttccactgtcatctcctactccaatacgggtgatggtgcccccaaggtctaccaagagacatcagagatgcgctcggcaccaggcgggatccgggagacacggaggactgttcgggattcagacagtggactggagcagatgtccattgggcatcacatccgggacagggctcacatcctccagcgctcccgaaaccatcgcacgggggaccaggaggagcggcaggactatatcaacctggatgagagtgaggccgcagcgtttgatgacgagtggcggcgggagacctcccgattccggcagcagcgtcccctggagtttcggcggcttgagtcctcaggggctgggggacgaaggcggaggggcctccccgcctggccatccagggacctgaggaytcccctttcccgacaktcccgccgytatgactggtgagggccccgggcctcaagcctcttctttgtaacaggctgagaggctgagaaatcaatcccctgaataanttttccctctccgattccccatcccccaatttnataattaaatttaaacagggaaagccgggcccccaactgnttccttgggggtcttnaggggagaacttttaacgggacctttttccctaactttttccttctttaaaa

SEQ ID NO: 157 - DNA, 1448 bp, Homo sapiens
  misc_feature (456): n equals a,t,g, or c
ggcctgaacccggggctggtgggcctttctgtgtcctactccttgcaggtgacatttgctctgaactggatgatacgaatgatgtcagatttggaatctaacatcgtggctgtggagagggtcaaggagtactccaagacagagacagaggcgccctgggtggtggaaggcagccgccctcccgaaggttggcccccacgtggggaggtggagttccggaattattctgtgcgctaccggccgggcctagacctggtgctgagagacctgagtctgcatgtgcacggtggcgaraaggtggggatcgtgggccgcactggggctggcaaktcttccatgaccytttgcctgttccgcatcctggaggcggcaaagggtgaaatccgcattgatggcctcaatgtggcagacatcggcctccatgacctgcgctctcagctgaccatcatcccgcangaccccatcctgttctcggggaccctgcgcatgaacctggaccccttcggcagctactcagaggaggacatttggtgggctttggagctgtcccacctgcacacgtttgtgagctcccagccggcagcctgggacttccagtgctcagagggcggggagaatctcagcgtgggccagaggcagctcgtgtgcctggcccgagccctgctccgcaagasccgcatcctggttttagacgaggccacagctgccatcgacctggagactgacaacctcatccaggctaccatccgcacccagtttgatacctgcactgtcctgaccatcgcacaccggcttaacactatcatggactacaccagggtcctggtcctggacaaaggagtagtagctgaatttgattctccagccaacctcattgcagctagaggcatcttctacgggatggccagagatgctggacttgcctaaaatatattcctgagatttcctcctggcctttcctggttttcatcaggaaggaaatgacaccaaatatgtccgcagaatggacttgatagcaaacactgggggcaccttaagattttgcacctgtaaagtgccttacagggtaactgtgctgaatgctttagatgaggaaatgatccccaagtggtgaatgacacgcctaaggtcacagctagtttgagccagttagactagtccccggtctcccgattcccaactgagtgttatttgcacactgcactgttttcaaataacgattttatgaaatgacctctgtcctccctctgatttttcatattttctaaagtttcgtttctgttttttaataaaaagctttttcctcctggaacagaagacagctgctgggtcaggccacccctaggaactcagtcctgtactctggggtgctgcctgaatccattaaaaatgggagtactgatgaaataaaactacatggtcaacagtaaaaaaaaawaaaaaaaaaa

SEQ ID NO: 158 - DNA, 1004 bp, Homo sapiens
ggcagagctccagactactttaaatgtctctsctctgactgaattgaaggaattgtaagtttcagttgctgaatatatcagtatatctgaactccggatctttttatttcctatttttggcttcctacataaattaataaagtctgtctatatttaaggtttctgggagtagttttgtctatatttaatccatagatgtgctcctagtcatcagtcttatttcagtaaaaccatctttctggccaaatctctaacacgttttttacttcagtagtgagggcaatgagaagctttattaagaaagatcctatttaaagggctaatttggtattgaaagcatgctgatataaagtccagtatttgaggatataaagaggatgtgcactgagctgtgctgatgttcagcatttattatactttaatgggatagtgcttcttgaccattatagaacaacaaactgtcaaagggttaatacagatgacccagacctgacattaaatcctcttgattagaaataattaaatgaattatttattcatttctctcctctgccaaatctacttagccccacaaaaatgccccagctcagttaacatttttttgtttttcactttaggtatctcttaggcaaatagagatataaattgtaataggaaacagtctctaaatgtgaggctgaatacagcttcagtctggctctctaataggacaaaagccagtccatgtgttgtctctmactgatttagctttttcttttctttgaacaattcggcatgaattgaaaccaggttttcctgtggaaagttatagcttgattgggagatagaagttgaattgagttctttcttgcaactcttagtgtttatttttatatctcagtaagacgaggataccttcagtttgaatctgcataatgttcactgccaaactccttctcatttaatgcttatggccttcacatttctgtataataaagatcaattatcagctmaaaaaaaawaaa

SEQ ID NO: 159 - DNA, 1509 bp, Homo sapiens
  misc_feature (1420): n equals a,t,g, or c
agagagagagactagttctctcttactcctaggcctttcggtttgcgcgacgggcaggaaagcgtgcgtgcggctaagagagtgggcgctctcgcggccgctgacgatggaagaactggagcaaggcctgttgatgcagccatgggcgtggctacagcttgcagagaactccctcttggccaaggtttttatcaccaagcagggctatgccttgttggtttcagatcttcaacaggtgtggcatgaacaggtggacactagtgtggtcagccagcgagccaaggagctgaacaagcggctcactgctcctcctgcagctttcctctgtcatttggataatctccttcgcccattgttgaaggacgctgctcaccctagcgamgctaccttctcctgtgattgtgtggcagatgcactgattctacgggtgcgaagtgagctctctggcctccccttctattggaatttccactgcatgctagctagtccttccctggtctcccaacatttgattcgtcctctgatgggcatgagtctggcattacagtgccaagtgagggagctagcaacgktacttcatatgaaagacctagagatccaagactaccaggagagtggggctacgctgattcgagatcgattgaagacagaaccatttgaagaaaattccttcttggaasaatttatgatagagaaactgccagaggcatgcagcattggtgatggaaagccctttgkcatgaatctgcaggatctgtatatggcagtcacsacacaagaggtccaagtgggacagaagcatcaaggcgctggagatcctcatacctcaaacagtgcttccctgcaaggaatcgatagccaatgtgtaaaccagccagaacaactggtctcctcagccccaaccctctcagcacctgagaaagagtccacgggtacttcaggccctctgcagagacctcagctgtcaaaggtcaagaggaagaagccaaggggtctcttcagttaatctgttgtggcctcagctgctgaggatggacttggagaayagcttccaagcttcaccttgaaagaagcttacatggcagcaatatttctaaaatagtgatacagtcagaggcctcctgtaagggcgagagaactgaagttgatgttgacaggcccacagggaattggccttccctgttcaagtggaagccagtctctgagaatcccgtgctctcctctcttttggtggaggttctgtaggttcaggtttctaccatggactttaggtatatagggcaagtcagcaagaaagcaccacacactcaggaagccttgtctacctttccctagcgtctctagccagccagccccagatactcctcagagacccacttctctcttttgcatggaataaaaagcactcacagtgccctgncttttgggattacttatggctgtggaacttcatgaacccaatttcactttccttcactgggttcccaccccattgttgtctctgggatg

SEQ ID NO: 160 - DNA, 2160 bp, Homo sapiens
  misc_feature (470): n equals a,t,g, or c
gctcgtgccgtggatgcggctctgcaggatgaagatgagatacaggtggatgcatcatcatttgaaagcactgcaaataagaaatcctcctcctcttcctcaggaacccctgcatctcagctttatccacagtctcgggggctggttccaaagtaaagccagcttctcctctcccagggcggaaacagcatttgccttctgagagaagagactagcaaaaagctgcagagaggattcggcccaaactcagaactgttcccctgaggagaagcggtggcctctttgcagatcaaccaacttaatctggttgaacgtgctgttcctaatctggcactcagcccctctgggaaacatcttttaattagcatctcagaaatgcatgggtaaggtaaagtgcgatagttcaagtggaaagcaagagaatgaccagtgaccttgcttccttcccccttgccttcttctcccccttnccctgtgctccctttctctcctctctccttttctagcctgttcttwacatggggctcccttcttgttgaacaatagggcagaatcaggrgtcaccttagcaggaccacatctttggagcctcgggataaaatgacagtgaggttgaaaagtgaaaaccctaggaacttgaataggtgcctgttcttgtagggagaaatgagaaatcgcatttggatccaggccccaggtgggcaccatcagcagtcttgcttccatgcacctcagtaagaagtggatctgcctttgggacctgctcagtgaggaaatctcttccaatttctgcttctgaatgattcaatgttgggagcaatagaaataacattccctttgccttctctgagtgtttagggaaatagcttctttaaaacctcaaaaccatgaccatcctgtcaaagacctaagtctgtaagctggtgccatgtccatacaccatgtcactttactcttcatttgtcaccatcttttcccatgcacgcatactctgaacatccttgtgtgggcccatcctctgcatccagagcatgctctgcagtgggcctgttttgtggaagaaaggaggctgtctctgccttctctgatgggactggagttgagggaaggagctgtattgtggcacttctgaattccccgttttgttccatattggtatagagagcagaagagtagctaggcagatgcagagatggagacatgagactcagtgcagtgggcagggaagacataacagatggaagcaaaggaatcctgcctgccttcagcagagaattcaccgaatcctagaactgtggctccctccaggcagagcctaagatgctggtgaagaatagctgtgtgattgaataggctcaaaggagagttcagaattcccatttacatattactagtttggtttgtaagttttagttccttgtattattgagattcagagcttcattttatgttggtcattaggtgaatattactcattttccctcaagagaagctcataagtgtgtgtgggtgtgagagcacgatggtgcctgtgttctgtgaatgtgtccatatgtgtctgtaagagagacagagaccaagaacttgcccaattttagaaatacactaatgtgcagttgttgccttttgtctgtattgaaggcccattgaatgactaatccaggctggaagcattcccatgtgggtgtctgagtccatgagccaagcctgaggggacagtgagtctccaggtctgccacactggtgcaccttgctggcacggtgcctcaggaaggtggcgactcargtgggccttgagttatattttaactcagctgctcagttcccagggcacatttctggatcagaacccatgggaaacaggaggtactaagtgcaatgtcttagcattctgcaaaatggagatctgttgtccagcggcttatctcctttttagtaacccttctttctgaacccagggcccttttcagccttccctcatattttcttgagatcaaactttacttctttcttatttactaagaatttgcctgtttgaataagaacaaaacgctaaggtgggtagcctaagctgattttctgctggttacacgtgtctctcacaccacatttcctcaaagctaatctgaattctgtaggctaaaaatattcatgtagcaa

SEQ ID NO: 161 - DNA, 3609 bp, Homo sapiens
ctggtaatcgaaaatgttaacatgcctgagsagattgttattcacgcactgcagtgtactcactatgtaatcctttggcaacttgctaagataactgaaagcagctctacaaaggaggacttgctgcgtttaaagaaacaaatgagagtattttgtcagatatgtcaacattacctgaccaacgtgaatactactgttaaggaacaggccttcactattctgtgtgatattttgatgatcttcagccatcagattatgtcaggagggcgtgacatgttagagccattagtgtatacccctgattcttcattgcagtctgagttgctcagctttattttggatcatgtcttcattgaacaggatgatgataataatagtgcagatggtcagcaagaggatgaagccagtaaaattgaagctctgcacaagagaagaaatttacttgcagcattttgtaagctaattgtatatactgtggtggagatgaatacagctgcagatatcttcaaacagtatatgaagtattataatgactatggagatatcatcaaagaaacaatgagtaaaacaaggcagatagacaaaattcagtgtgctaagacccttattctcagtctgcaacagcttttaatgaaatgatacaagaaaatggctataattttgatagatcatcctctacatttagtggcataaaagaacttgctcgacgttttgctttaacttttggacttgatcagttgaaaacaagagaagccattgccatgctacacaaagatggcatagaatttgcttttaaagagcctaatccgcaaggggagagccatccacctttaaatttggcatttcttgatattctgagtgaattttcttctaaactacttcgacaagacaaaagaacagtgtatgtttacttggaaaagttcatgacctttcagatgtcactccgaagagaggatgtgtggcttccactgatgtcttaccgaaattctttgctagctggtggtgatgatgacaccatgtcagtcattagtggaatcagcagccgggggtcaacagtacggagtaaaaaatcaaaaccatctacaggaaaacggaaagtggttgagggcatgcagctttcactcactgaagaaagtagtagtagtgacagtatgtggttaagcagagaacaaacactgcacacccctgttatgatgcagacaccacaactcacctccactattatgagagagcccaaaagattacggcctgaggatagcttcatgagtgtttatccaatgcagactgaacatcatcaaacacctcttgattataatcggcgtggcacaagcctaatggaagatgatgaagagccaattgtggaagatgttatgatgtcctcagaagggaggattgaggatcttaatgagggaatggattttgacaccatggatatagatttgccaccatcaaagaacagacgagagagaacagaactgaagcctgatttctttgatccagcttcaattatggatgaatcagttcttggagtgtcaatgttttaataccagtacacaattaaatctgtggtgaagtcattttctaagtggaagaggaaattttaaagtgtggtagatacagtgaaattctgtacagatttttctctaaggagaatatgacatgcttatgcttaccaagatcaagtgcattgaggggcagttttgtttgcctgaataaacgtaaaggacaagtaaacaatttgatgataagctacagtttttcttagaaagtaaatattttatttatgcgctgttagttggcttttgaatcgattatttcatgcttttttttaaaaaaaaaaaaaacaaaataacaatctgaagaggcatttggtacagatatgaattctcttacatttatttactggttgtactaaataatgatgacctctgctggatttctgtttacatccagaaaacaatgttaaggatgtatttattcccctaccctgaagaaagtgtaggatagaattgtttttagcattctaaatttaaatgcttaaaacgtcaatcaacaaaactttgttttaaatattgtaattgtggagaaaagtaaacttataagcagaacttttacaattttttcatctaaaagtattttaagatatttttaaaatccaagagcttctctatacttttcagaaatatccagatgcagtgaactgccagaaggtaaccagtctcaaacatgcttatcccattatcaaccctgaaagtttgcttgtcctttaagataaaaatgtaatgttgtgatattccttccagtaatgccactgtattttgtctccaaataaaagaagcttattgtagtatgtttgcagaaaaattctaaacaaaaattatacagcttattagagtgtgggaatagggatctaaattttaaataaaattatatatatatataaattggtgctgattttataattgcgcagtttgtttagttttttcttacttttaaattccaacttaaaattatgaggtttcagaaatatattgaaagtttaacaatgtttaaaaatagaaaagcatgagtgttcatgctttaaaatgatttttaaatttgtattttatattgttttatctatctgtctttgcaagcagtcttcaggttaaagatacttctaacaggttacagtacatttcctctgtatgtaaattagatgggataatagaattcataacccataatattctttgaaagctaagctttaaacttcattttatgtcctttcacaaataaattagtttaaaacagaaagtggctacttgccattttgacatcaactcattttgcgaggcttaggcagctagacatcgtttaaaacaaaatattaacttatattacatgtgtatctatctattgtcagtcgtctctcagttcttgaggtatattattttaatcattccatgccttaatatgcttgcaatacaagaatatcttcagatgggtgaataccaaaaggctttcagtttttagtcagaaatcaagcattgggctgtggtagccaaaaaccataggttagctaaaaagatcatgatacaattattttattaagtcatggttaataacaaatgaatccagacttgtctaacagattttccatcaacaaatattgttatgtgcaaaagtattgcctatgttgttttacacaccactgcattaactagaactgctgagaggactgtatatatgattttaaacctaagttgattttttttctcactcttgaaaggagtacttctttgtgaaagcagttcttacagctttgttttcaaccagctaaaaatgttttatatattactctaacctgttgtcctccacattctattgtcctaattgtactgttttctgatttgtatttatgtcttgagacagtaactttttgaataaaaataaacctacagtatgttgtatgttttctcttgtactcaaagggggagggtggctataaatggtttgcaaatttatatctattatcacatcttttaatgtgtttggggaataatttatagagaataccatcagtttatatttttaataaatcatatgtatttacaatgaaaaaaaaaa

SEQ ID NO: 162 - DNA, 1603 bp, Homo sapiens
  misc_feature (1600): n equals a,t,g, or c
gttcaggagagatcacgctgctgccctcccgggacaacccccgtcgcctgcgcgtgctgctgcgctacaaagtgggagaccaggaggagaagaccaaagactttgccatggaggactgagcgttgccttttctcccagctacctcccaaagcagcctgacctgcgtgggagaggcgtagmgagtcggaggggaaagggagatcccacgtgcaagtagggggaatatctcccccttttccctcatagcctctagggagggagagtgacttcattctccatttkaagagattcttctggtgatgtttacttaaaaagtgatccccctcaacaacggatacagcgtgcttattattgggcatttagcctcaaaagcatgtagtaccaagcacttgtatttccgtatattttgtttcgcgggggagtgagggggaagaacacggatgaaaatgtcagtttttgaagggtccatgcacatccctgacacctcacaccttatctaagtctgaagctggggagaaaggggttcatttagacttcatacatttccagtacgactttagtatctctccagagccatattttctcagtccgaattaattccccctccctaggtgcctgtaggctatggtacttcttcctcattgttttctaggtaaacttcactactggtaattaaggggaaggatatgaggaagcagtttaaatagccctgttctcattactctgaccacatacatcatagggtgctaaagttgatgaacacattaatccgttaagtaaaatggactttgtaattgtacagcatacctaagaaactcagaaggtgcatttaagagagagacctgaaagaaatagtatggatttttaaaaattcttgtctctactattataaccaaaaaatatttcttgtatgtcccataaaaatatttgkgtaattcttatgaaacaggctggtagaggaggtttctgagcctagcccaagggcttattcatcaccatgggtaaattatttaaactcacttaattaaggaaaatattttcccagctagaaaagtatactcattctcatttaaactctctcatttggagggatcatgtgagttggcctacttacaagtagtgaaagttcccttttcagttttgttttgttttgttttgtttttctctttcactcagccaaatgtgaaagttgtgaatttaggaaaatcacttgtaatgaagtgtgaatcttgttatcaaatttatttctctgatgtttccttccttatccttgtagccaataaaacattgacattctcacgttttatagatgaggtaaaaagtcttgtgtgctgtgagttataatgcttttgcctttttaatattattagttcttaagtgttacagccccttcagaatataacttcaggacaattcaaactatgcttaatgtatgattttcgagcttctgtatgctaagaaaataggtgtgaaaaactggtgttctgaaatagcctaacatttattgtaattctgaattttctgcccttttattcattgcatattaaagtattagagtataaaaactaaaaaaaaaaaaaaaaaaaaaaaaaaaaaaaanccc

SEQ ID NO: 163 - DNA, 853 bp, Homo sapiens
gaataaacccaacctacagagcatcatagcttagcctagcctgctttaaatgtgctcagaaaacttccattagcctgcaattaggcaaaatcatcaaacataaaaccatcaaacataaaatatttataaagtgttgaatatctcatatagtttattgaatacctgcatccaaaagatgctggcaacacagcacactttagagcattggttgtttactctcttgatggtatggctgcccagcatcaagagttatcatactgcaaatcgatagcccaggaaaagagcaaaattcaaagttcaaagtagagtttttactgaatgcttgcttttgcaccgtcgtaaagttgaaaagaatttaaattgaaccatcataagctgcagactgtgcattttatattgaaaagttaatatttttaatttttaatgcagagaagtacccaaagcataagaacacaacacattttcacaaagcaaacacagccatggaaccagcacccatatcaactaacaaaatactagtttgggcttttttgtactttatacaaatggactcatataatgttcatcttttgggtctgcctgctttcattcaatattaggtttgtgggttcatctctgctgtgtgtagttctttcctgttctttatacagtgttccaaagtatagtatattacagtttacccattctactcttgatagtaaatgttttcacatttgggctattacaaatagtgctgcagtgaacattcacatacacatcttttggtgaacatgtgttacatttccaagtacaattgctgggtgatgagtatgcatactcttaaaacatggttgtaccaatttacacctctacg

SEQ ID NO: 164 - DNA, 1917 bp, Homo sapiens
  misc_feature (1433): n equals a,t,g, or c
  misc_feature (1856): n equals a,t,g, or c
gcccacgcgtccgcggacgcgtgggaaacttttgtaaaaaaagtttattcttaaatgtacaacagctccaagacaacattaattccagctatacgagaagtttcttcacaggtataagatgatctctgaattcacctggcccaaccatgaccttccttcagacaaagaggctgtcaagaaactaattgaacggtgtggttttcaggatgatgtagcttatgggaagaccaaaattttcattcgaacaccccgaacattgtttaccttggaagaactccgtgcccagatgctcataaggattgtcctctttctacaaaasgtgtggcggggcaccckggcccgcatgcggtacaaaagaaccaaggcagctctgacaataatcaggtactaccggcgctacaaagtgaagtcgtacatycacgargtggccagacgcttccatggcgtcaagaccatgcgagactacgggaagcacgtgaagtggccaagccctcctaaagttcttcgccgttttgaggaggccctgcagacgattttcaatagatggagagcatcccagctcatcaagagcattccggcctcagacctgccccaggtcagggcaaaggttgcagccgtggaaatgttgaagggtcaaagggctgacctcgggctccagagggcctgggagggcaactatcttgcttcaaagccagatacacctcagacctcaggcacttttgtccctgttgctaatgaattgaaacggaaggacaaatacatgaatgtcctcttttcctgtcacgtccgtaagtaaatcgatttagtaaggtggaagacagagcaatttttgtcactgaccgtcacctgtataaaatggatcccactaaacagtacaaggtgatgaagactatccctctatacaatttgactggtctgagtgtctccaatggaaaggaccaacttgtagtgttccatacgaaagacaacaaagacctcattgtctgcctcttcagcaaacagccaacccatgagagtcgaattggagaacttgttggagtgctggtgaatcatttcaagagtgagaagcgccaccttcaagtgaacgtcaccaacccagtacagtgcagcctgcacgggaagaagtgcaccgtctccgtggagacgcggctcaaccagccccagcccgacttcaccaagaatcgctcgggcttcatcctcagcgtgcccgggaactgacgccccgcggaggcctggcccggagcccggccacactccgagtcctgggtcccagtccagctgctgcctcccaacccatgcccgctagaaacctgctgcgagggcccctcccagaggagccccgcccctgtaagatttccttcctggttttctgcctttggtatcatcttcctctgtccttactgtccacggtccctgttcaataagccaaagancctggtgccccgcccagacccctgggctgacgtccagaccaatctcaccccarargcaactggatggtgcctttagttggtgcggatgccccgtggcaggtcaagtcagagcacctggacaggtgtcctccctgctgctgaccctgcagagggaaggggtggggatgcaggaccccgctctgcgggagccccatagccacctctyttgcccaaggtgagccagccctggggacccagctcagggaggctctgctcagagttcggcggacccaccccaacccaactcccagccgccagccaaagccactgggtgagcagagtcacccacagggccagcccctcagccaggagccagtggaggagcggaacagcccatccagcagagtgagtccatccttcccaggttctcccctgggagactcnctttgccaccaaggcccccaccagggctctgaccaccgctctggagaggacagtgtggcat

SEQ ID NO: 165 - DNA, 2420 bp, Homo sapiens
gcacctccgtgcgcccggttgcagcgtggacgccggatgagttgcttttaggcttgctggcccgcggggctgtccaggcacgcgaggcccctcagcaacaaaatgcttcaacaagttccagaaaacataaattttcctgctgaagaagagaaaatcttggagttttggactgaatttaattgttttcaggaatgcttaaagcaatcaaaacataaaccaaaatttaccttctatgatggtcctccttttgcaactggactgcctcactatggacatatacttgcgggtacaattaaagatatagttacaagatatgctcaccagagtgggtttcatgttgacagaagatttggatgggattgccatggcttacctgtggaatatgaaattgataagacactgggaatcagaggaccagaggatgtggccaaaatggggattacagagtataacaatcagtgccgagcaattgtgatgagatattctgctgagtggaagtctactgttagcagacttggccgatggattgactttgacaatgactataaaactctgtatccacaattcatggaatcagtctggtgggtcttcaaacaactctatgataaaggccttgtttatagaggtgtgaaagtcatgcccttctctacggcatgtaacactccactttccaacttcgagtcacaccagaattataaggatgttcaagatccttcagtatttgtaactttccctttggaagaagatgaaactgtatctttagttgcttggacaaccactccctggactctacctagtaaccttgctgtgtgtgttaatccagaaatgcaatatgtgaaaattaaagatgttgccagaggacgattactcattttaatggaagccagattgtcagccctctataaattggagagtgactatgagatccttgaaagatttcctggtgcctatcttaaaggcaagaagtacaggcccctgtttgactatttcctgaagtgtaaagagaatggcgctttcactgtgcttgttgacaactatgtgaaggaagaagaaggcacaggggttgtccaccaagctccttacttcggtgctgaggactatcgggtctgtatggactttaacattattcggaaagactcactccctgtttgccctgtggatgcttcaggctgcttcacaacggaggtgacagatttcgcaggacagtatgtgaaggatgctgacaaaagtatcatcaggactttgaaggaacaaggccgacttctggttgccaccaccttcactcacagctaccctttttgctggagatcagacactcctctaatttacaaagcagtgcccagctggtttgtgcgagtggagaacatggtggaccagctcctaaggaacaatgacctgtgctactgggtcccagagttggtacgagaaaaacgatttggaaattggctgaaagatgcacgtgactggacaatttccagaaacagatactggggcacccccatcccactgtgggtcagcgatgactttgaggaggtggtatgcattgggtcagtggcggaacttgaagaactgtcaggagcaaagatctcagatctccacagagagagtgttgaccacctgaccattccttcacgctgtgggaagggatccttgcaccgcatctctgaagtgtttgactgttggtttgagagtggcagcatgccctatgctcaggttcattacccgtttgaaaacaagagggagtttgaggatgcttttcctgcagatttcattgccgagggcatcgaccaaaccagaggatggttttataccctgctggtgctggccacggccctctttggacaaccgcctttcaagaacgtaattgtgaatgggcttgtcctggcaagtgatggccaaaaaatgagcaaacggaaaaagaattatccagatccagtttccatcatccagaagtatggtgctgatgccctcagattatatctgattaactcccctgtggtgagagcagaaaacctccgctttaaagaagagggtgtgcgggacgtccttaaggatgtactgctcccatggtacaatgcctatcgcttcttaatccagaacgttctgaggctccagaaggaggaagaaatagaatttctctacaatgagaacacggttagagaaagccccaacattacagaccggtggatcctgtccttcatgcagtctctcattggcttctttgagactgaaatggcaggtgagtctctcttggtctgtcctcccaggaataaggactattctctttgtaackgcccttttgatatttaatagtggaaatattgagagatacagamaattaaataattgtttccttttacctctcatatagttttgttaaggcttgttaattgtcgtgatatctttgtttaagacctggg

SEQ ID NO: 166 - DNA, 2061 bp, Homo sapiens
gccggcaccgcagcagcccgaggagggcgcgggcrcgrggcccggtgcgtgcagcctgcacctcagcgagcgcgccgactggcagtactcgcagcgcgagctggacgccgtcgaggtcttcttctcgcgcacggcccgggacaaccggctcggctgcatgttcgtgcgctgcgcgccctccagccgctacacgctgctcttctcgcacggcaacgccgtggacctgggccagatgtgcagcttctacattggcctcggctcccgcatcaactgcaacatcttctcctacgactactcgggatacggcgtcagtcgggcaagccctccgagaagaacctctacgccgacatcgacgccgcgtggmaggcgctgcgcacccggtatggcgtgagtcccgagaacattatcctctatggtcagagcattgggactgtccccacggtagacttggcctcgaggtatgaatgcgcagggtaattctccattcccctctgatgtctggtttgcgtgtggcttttccggataccaggaaaacatactgctttgatgctttccccagcattgacaagatatctaaagtcacctctcctgtgttggtcattcatggtacagaggatgaggtcatcgatttctcccatggcctagcgatgtacgagcgctgtccccgagccgtggagcccctttggkttgaaggggctgggcataatgacatagagctttatgcacaatacctagaaagactaaaacagttcatatctcacgaacttcctaattcctgaagacaacaacttgatcttacctcatttactgtgaacagaagagtcctctgttttgcacatgctttaactgggtagctgtaaaggcttgataaccatgaagaagtgcccaacctttagggtgttctaatcaaagagctgatgaaatctcagtcttttgtatctagaggtggttctgctaattcacacaacacgttaaactgaacagtcgtgattcccagcttcattaccttgcaggaatgggaatgagagctgaatgtagggacaattttctagtgctgtataaagtagcctcgcatctgtttctcaaccttatccatcatttctgacattcatgcaggacttgccctgttgccaccaatgttctcggtatttcacatgcagctctctttctgccactggatacatgggttcaatccatttgtgaagctgtgatagtgtaactggaaagctagtgtggtgaaaattcctttattattttttgttaacatgctgatctttcccggacaaatgaactgaagggtaatttactggaactctcgtgtacagcttcatcaactgtaaccatataaatataactggaatattcttaaacaaaaagaaactaggggtttttttaagtgtaaatttattactagccaacagagttttactattttgattgtctggttggtttaacaaagagcctagctgactttccttctgtaaagtcctccttgtaggcttttttaaagtactgtacatatttgcaatcacattgtgcatagattcttaatggtagatatgatttcttttgtcaggctacaacaatgaactgcagattccttgtttgtaatgtaaatgattgaatacattttgttaatatgtttttattcctatgttttgctattaaaaattttataacatttccaagacaaaaattccaagtttatgctttgaagaatttatgtaattaaaatttcactaaactaatctttttagtttaggaattatttgggttttgacactggaagttgcgccaaataagcatcagaaataggagatgcttaacattgctatactacttgtgttggttaggggtttggatttgggggttctttggttttaatttttttttccacatttaaaagccttaaatgtactgtaagcctcagatcgttgtacaactggactgcggttgattgccagtttgtgtactgttgcttggatgcggcacagtggttggtaatggaataaaggatgcatggatcagaaaaaaaaaaaaaaaaaaaaaaaaaaaaaaaaa

SEQ ID NO: 167 - DNA, 2567 bp, Homo sapiens
  misc_feature (16): n equals a,t,g, or c
  misc_feature (55): n equals a,t,g, or c
  misc_feature (74): n equals a,t,g, or c
ggagaaggcggcggtnggcggcgtggacggcccgcagcgggacggccgcggcganggcggacagccgggcgcancggcggyacaggggcccccgccggcgcctcagctcacagagacgctgggcttctacgagagcgaccggcggcgggagaggcgscgggccgcacagagctttcattgttgaggttcctcagtgctgaactaacaagagggtacttccttgaacataatgaggccaagtatacagaaagaagagaaagagtatacacttgtttgcgaataccaagagaattggaaaagctgatggtttttggaatctttctgtgcctggatgcgtttttgtatgtgttcaccctgcttcctttaagagttttcctggcactattcaggctcctcactttgccttgctatggcttaagggacagacgtttgcttcagcctgcccaggtgtgtgacattttgaagggtgtcattttggtaatctgctattttatgatgcactatgttgactactccatgatgtaccacctgataagggggcagtccgtcatcaagctctacatcatctacaacatgctggaggtagctgatcgtctgttttcatcttttggacaagacatattagatgctctctattggacagcaacagagcctaaagaaagaaaaagagcccacattggggtgattcctcactttttcatggctgttctctatgtctttttgcatgcaattcttataatgsttcaagcaacaactctcaatgtagcttttaactcacacaacaagtctttgtctactatcatgatgtctaataatyttgttgaaattaaaggaagtgttttcaagaagtttgaaaagaacaatctctttcaaatgtcaaatagcgatattaaggaacgattcacaaaytatgtgctyttactgatagtgtgtctaagaaacatggaacagttttcttggaatccasatcatctctgggtgttgtttccagatgtctgtatggtaattgcatcagaaattgccgtggatattgtaaaacatgcctttattactaaattcaatgacattactgcagatgtctacagtgaatatagagccagtcttgcttttgaccttgttagcagccgacagaaaaatgcatacactgattacagtgactctgtagcacggaggatgggctttattcctctcccactagctgttttactcatcagagttgtaacaagctcaattaaagtgcaaggaatcctgtcttatgcctgtgtcatactcttctattttgggttgatatccctgaaagtacttaatagcatcgtgctgttggggaaatcgtgccagtatgtgaaggaagccaaaatggaagagaagctgtcgaatcctcccgcaacctgcactccaggcaagccgtccagtaaatcacagaacaaatgtaaaccctctcaaggcctttccacagaagaaaacctgtctgcctccatcaccaaacaacctattcatcaaaaggaaaatatcataccattacttgtgacaagcaattctgatcagtttttgacaactccagatggtgacgagaaggacataacgcaggacaattctgaattaaaacacagatcctcaaagaaagatttgttagagatagacaggttcacaatttgtggaaaccgaattgactgaatctgtggcttcatgcgctgaagaagctgggtcctggggcaacaagtgctgtgttgccaggacaaatagatgctaaacatggcacttaaatatttatttaaaaacttaaattattattggcaagcaaatcttagtatctttcttccagtaatatggcctggctgagggtcagaccacaggacaggagcgacctccggccttgactgtctgggaagcttgatggattataaaacttcctcctgcctggccaagcagcagcatcatttccaggacccaacaaaggcaacatcaaaatctgttttgctttgtcagtctgggcttccagaatgttgaatttgcctcaaggcctcttcagtataaggaaatacctggaaaactgtgaaacttttaccacgacgtaatctttccagtctcatactattttcacaaacagttttcaaacgttacttcatctgccaaagcattaaaaaaattaaacataagtcaagataaatgttcttaccaccagaataacccttaaagatgtatcttaattaatcagaataaaaggctaccttaaataagacatgatgaatagtagcattttgtagggttaaaaaaaaaatgctaaactagtttatttattaaaaaaataattaatgaaggctatgcattactgggaaaaatccttcataatttttcagtttactctttaaagcaaaatgtgagctgtatgtcatttaattggtggataaaacaaatttccttacaaaagggcactttttacaccaaggaagcagagcagtgttaactttaaggtatacttaactgattttgctttaaaactaattacytccmtaaattattacmgctaaagggttycgrtgttggarccgggcyggaaaattgtccat

SEQ ID NO: 168 - DNA, 2324 bp, Homo sapiens
cccacgcgtccggtccttccggtatcgcgttgctcaggggcttttcaaccctctgtcagtcggcgatcgcaagcaggctcttctaagttcccgacgcctcttggcccggaaaactccgggaaccccacactgctttcctctgcccagcccgagactcgggtcagttactggacgaaactgctctcccagctccttgcgccgctccccggattgcttcagaaggtgctaatttggagccaacttttcggtggaatgtttccgaccagatggctagattttgctggagtctacagcgccctgagagccctgaagggacgggagaaaccagccgcccccacagcgcagaaatctttgagttcgctgcagctcgactcctcagacccctcggtcaccagtccccttgattggctagaggaggggatccactggcaatactcgcccccagacctaaaattggagcttaaggccaagggaagtgctttggaccctgcagcacaggcttttctcttagagcagcagctgtggggagtggagctgttgcccagtagccttcaatcccgtctgtactctaaccgggaacttggctcttcgccctctgggcttctaaacattcaacgcatagacaatttcagtgtggtatcctatttgctgaacccttcctacctggactgctttcctaggctagaagtcagctatcagaacagtgatggaaatagcgaggtagtcggcttccagacactaaccccagagagcagctgcctgagagaggaccattgtcatccccagccgytgartgcagaactcattccggsctcgtggcagggatgtccacctctttctacggaaggcctaccagaaattcaccatcttcgcatgaaacggctggaattccttcaacaggctagcaaggggcaagatwtacccacccctgaccaggataatggctaccacagcctggaggaggaacacagccttctccggatggatccaaaacactgcagagataacccaacacagtttgttcctgctgctggagacattcctggaaacacccaggaatccactgaagaaaaaatagaattattaactacagaggttccacttgctttggaagaagagagcccttctgagggctgtccatctagtgagatacctatggaaaaggagcctggagagggccgaataagtgtagttgattactcatacctagaaggtgaccttcccatttctgccagaccagcttgtagtaacaaactgatagattatattttgggaggtgcatccagtgacctggaaacaagttctgatccagaaggtgaggattgggatgaggaagctgaggatgatggttttgatagtgatagctcactgtcagactcagaccttgaacaagaccctgaagggcttcacctttggaactctttctgcagtgtagatccttataatccccagaactttacagcaacaattcagactgctgccagaattgttcctgaagagccttctgattcagagaaggatttgtctggcaagtctgatctagagaattcctcccagtctggaagccttcctgagacccctgagcatagttctggggaggaagatgactgggaatctagtgcagatgaagcagagagtctcaaactgtggaactcattctgtaattctgatgacccctacaaccctttaaattttaaggctccttttcaaacatcaggggaaaatgagaaaggctgtcgtgactcaaagaccccatctgagtccattgtggccatttctgagtgtcacaccttactttcttgtaaggtgcagctgttggggagccaagaaagtgaatgtccagactcggtacagcgtgacgttctttctggaggaagacacacacatgtcaaaagaaaaaaggtaaccttccttgaagaagttactgagtattatataagtggtgatgaggatcgcaaaggaccatgggaagaatttgcaagggatggatgcaggttccagaaacgaattcaagaaacagaagatgctattggatattgcttgacatttgaacacagagaaagaatgtttaatagactccagggaacatgcttcaaaggacttaatgttctcaagcaatgttgagttggcagcctgtagtcctagctagcatacactacctcttacctgagaggtgtcttttaaaaacaaatcttggcagctgtcctttgacattttttttttagrggaatgtaactggmctrgtaatttttttttttgcaacatatccccactccagaaacattccaggtttgaagccagccctggataatgaaggatgaact

SEQ ID NO: 169 - DNA, 1784 bp, Homo sapiens
  misc_feature (200): n equals a,t,g, or c
  misc_feature (215): n equals a,t,g, or c
  misc_feature (1759): n equals a,t,g, or c
  misc_feature (1778): n equals a,t,g, or c
gagaattaccttcagctgtatcaattacagtacacaggaattgttacgatttcctaaacttcatgatgccatagttgaagtggtgacttgtcttcttcgtaaaaggttgcctgttacaaatgaaatggtccataacttagtggcaattgaactggcttatatcaacacaaaacatccagactttgctgatgcttgtgggntaatgaacaataatntagaggaacaaaggagaaacaggctagccagagaattaccttcagctgtatcacgagacaaggttgcatctggaggtggtggggttggagatggtgttcaagaaccaaccacaggcaactggagaggaatgctgaaaacttcaaaagctgaagagttattagcagaagaaaaatcaaaacccattccaattatgccagccagtccacaaaaaggtcatgccgtgaacctgctagatgtgccagttcctgttgcacgaaaactatctgctcgggaacagcgagattgtgaggttattgaacgactcattaaatcatattttctcattgtcagaaagaatattcaagacagtgtgccaaaggcagtaatgcattttttggttaatcatgtgaaagacactcttcagagtgagctagtaggccagctgtataaatcatccttattggatgatcttctgacagaatctgaggacatggcacagcgcaggaaagaagcagctgatatgctaaaggcattacaaggagccagtcaaattattgctgaaatccgggagactcatctttggtgaagagaactatgtaatactgagactttgttgactcaaaacttgctagttactgcctacctgagtagaatcttatttatgaactcctgtgtattgcaatggtatgaatctgctcatgtggagactggctataaactgaaaagtgtattccaaattgcagaacacatcacacatttaatccaaataataaatggctgtttctaaagtttcccagtatatataaaatacatcaagtctgtcttgtgacagtttcatctgaacttaacttaaaaacaactgttaatgttctagttgtgcaaagcagtttgcctgtggataagatgacctgtgtaataatctttgttagtagtcttaaagctgctgccatagtcctccaagaagaaagcaccaagacaacatttcatatgactataatgcatgtactatataagctgatctggctttgaaagatgtgagttggcaagttcctcacatagagtcattgtattccacctgtccttcaatttagttttttctgagcttctttgcagcctttgatgtgtttttaagaaagctgaatgcacaagaggatctgtgacactgacatggctgtggtgtgcatactgtgtagttacatagcccttccaattctgggtccatttgcactagcaaattaaaatatgctttgattcatacttaaacctgaaagcaggaatgcctacattaattcctacattaaaaacagccatctacccttgattatctagwaagacttggtaatgatggtcagttccttttagatttcagaaaatcaaatgatgacctaaatttcccttaatttgcaaatacagtagtaattaaggtacatctctaaagtggagcacttacaccaggctctaagattcactttgaggtggaacttaaaaccagtgtactgtatgtatgcattggtaatagctactttkgcttcatagcttccataccaacmaaatatatttrttnagratagtatgaaagtcangggagg

SEQ ID NO: 170 - DNA, 1296 bp, Homo sapiens
  misc_feature (1261): n equals a,t,g, or c
  misc_feature (1276): n equals a,t,g, or c
ggcggtgcagaggcggcaggaagatggagttggggagttgcctggagggcgggagggaggcggcggaggaagagggcgagcctgaggtgaaaaagcggcgacttctgtgtgtggagtttgcctcggtcgcaagctgcgatgccgcagtggctcagtgcttcctggccgagaacgactgggagatggaaagggctctgaactcctacttcgagcctccggtggaggagagcgccttggaacgccgacctgaaaccatctctgagcccaagacctatgttgacctaaccaatgaagaaacaactgattccaccacttctaaaatcagcccatctgaagatactcagcaagaaaatggcagcatgttctctctcattacctggaatattgatggattagatctaaacaatctgtcagagagggctcgaggggtgtgttcctacttagctttgtacagcccagatgtgatatttctacaggaagttattcccccatattatagctacctaaagaagagatcaagtaattatgagattattacaggtcatgaagaaggakatttcacagctataatgttgaagaaatcaagagtgaaattaaaaagccaagagattattccttttccaagtaccaaaatgatgagaaaccttttatgtgtgcatgtgaaygtgtcaggaaatgagctttgccttatgacatcccatttggagagcaccagagggcatgctgcggaacgaatgaatcagttaaaaatggttttaaagaaaatgcaagaggctccagagtcagctacagttatatttgcaggagatacaaatctaagggatcgagaggttaccagatgtggtggtttacccaacaacattgtggatgtctgggagtttttgggyaaacctaaacattgccagtatacatgggatacacaaatgaactctaatcttggaataactgctgcttgtaaacttcgttttgatcgaatatttttcagagcagcagcagaagagggacacattattccccgaagtttggaccttcttggattagaaaaactggactgtggtagatttcctagtgatcactggggtcttctgtgcaacttagatataatattgtaaaatgcttttcaagtgtgggttttgccctgattgttgcaaatacaatttccaccttctggaaaggtaggtttgctgtggaggaaataatgwactagatcattgtcacagaaaaaccaactatgatttatggkkgtgttttcmccaryatnagacggaaagacccnccccttcttcccccccccct

SEQ ID NO: 171 - DNA, 1897 bp, Homo sapiens
  misc_feature (952): n equals a,t,g, or c
gagaaaactgacttcgaggaattctttctaaggtgtcagatgcctgatacattcaattcatggtttcttataaccctactccacgtctggatgtgtctagtccgaatgaagcaggaaggccggagtgggaagtacatgtgtcgtatcatagttcattttatgtgggaggatgttcagcagcgcgcagagtcatgggggttaatccctatatcctgaagaagaacatgatcctcatgacaaatcatttctatgcagcgatcttgggatatgatgaggggatcctttcagatgatcatgggctggccgctgccctctggagaaccttcttcaaccggaaatgtgaagaccctcgacatcttgaattgctggtagagtatgtgaggaaacagatacagtacctggactccatgaacggggaggatctgcttctgacaggggaggtgagctggcgccctctagtggagaagaatcctcagagcatcctgaagccccattctccgacttacaacgacgagggactttgatgggctgggcctccgcacggcccgccagctggcttcgaggaacctccaggagagaagtgcctgttggtccaggaccctgcagaaagtggcctgaactgacctctgaacagcatctgtcaaatacctggccccatttgtgttgagtttcctcttagtgtgcccaggagtctgatctgctggggtacagggctgggagaacccctagctctcccggggtgtcctctcccttaggggaagccccgagtgagagtcccccagcacacactccccaaccccctccagcaactacatgtgactgatagcttttcccaaaggccaaggaagggatggtgtaggttcaaaagggaaaccccccagggcctgctgtggcctaggagcagattgtaatgctgccgagtccggtcggtgaccacgcgttgtccctcggntttcagccatggggttgagttggccattaaaagaaacagagacttctctctgccatggcccttctttattccagggacttagaaacttgcctgagatggtggacgcagtaatgagggcaccgcgcastcagttagagacggagaaagggaagaggctgggatggtctctgctgctcttgcctctagttcatggagatgtgtctctgttcaggccaagatacagccagccaggcctgtcgtctgggacccaggaggcctctgatgaccaagggctttcacatcctaagtcatttggaaggaggccttgagaacaaagtcacctttgtcactcccagtgaactgaatgaggaacatgctgtctcctgtcttggcctcccctttcatgagatactggggagaagagaacattcctcctggcttagttgtagcagacccagacctgtgcccagctttggtcccccttcccaacttctgaagcacgtgctgcagagccaccttggtctgagcacctgaggaccagcccctcctccctcagtgcgggtcatctcttgggggattttcttaaagtgaagaaagggggtggggaaccatattgcccctccctcccccatcaaacttccttcatttaacttgctataaaatgagtcatataaagaaactctatatgggtgaggtatatcccacttctgtgaaaacattacaaatcaaaccgcttctctcagtttatttaagatgcttttgttgcgagcggagctctagagtgaagcctcctgtgtgtgtgtgagataataacaccttgtaactcattacagctgggcactatttacataaaccagagctgagccaggcaggaatttgctgattaatttatttttaatggagtgaagtataccatgcaccaaaataaactttactgtgtgtacctaaaaaaaaaaaaaaaaaaaa

SEQ ID NO: 172 - DNA, 1723 bp, Homo sapiens
cggggagttcacctccgcccgtcacctcctccccttgtcgcctaggtccacccgagccccctcccccgggccgcccccgagcacgaagttggcgggagcctataaaagctggtgccggcgcgacccgsggacacacagtgcaggcgcccaagccgccgccgccagatcggtgccgattcctgccctgccccgaccgccagcgcgaccatgtcccatcactgggggtacggcaaacacaacggacctgagcactggcataaggacttccccattgccaagggagagcgccagtcccctgttgacatcgacactcatacagccaagtatgacccttccctgaagcccctgtctgtttcctatgatcaagcaacttccctgaggatcctcaacaatggtcatgctttcaacgtggagtttgatgactctcaggacaaagcagtgctcaagggaggacccctggatggcacttacagattgattcagtttcactttcactggggttcacttgatggacaaggttcagagcatactgtggataaaaagaaatatgctgcagaacttcacttggttcactggaacaccaaatatggggattttgggaaagctgtgcagcaacctgatggactggccgttctaggtatttttttgaaggttggcagcgctaaaccgggccttcagaaagttgttgatgtgctggattccattaaaacaaagggcaagagtgctgacttcactaacttcgatcctcgtggcctccttcctgaatccctggattactggacctacccaggctcactgaccacccctcctcttctggaatgtgtgacctggattgtgctcaaggaacccatcagcgtcagcagcgagcaggtgttgaaattccgtaaacttaacttcaatggggagggtgaacccgaagaactgatggtggacaactggcgcccagctcagccactgaagaacaggcaaatcaaagcttccttcaaataagatggtcccatagtctgtatccaaataatgaatcttcgggtgtttccctttagctaagcacagatctaccttggtgatttggaccctggttgctttgtgtctagttttctagacccttcatctcttacttgatagacttactaataaaatgtgaagactagaccaattgtcatgcttgacacaactgctgtggctggttggtgctttgtttatggtagtagtttttctgtaacacagaatataggataagaaataagaataaagtaccttgactttgttcacagcatgtagggtgatgagcactcacaattgttgactaaaatgctgcttttaaaacataggaaagtagaatggttgagtgcaaatccatagcacaagataaattgagctagttaaggcaaatcaggtaaaatagtcatgattctatgtaatgtaaaccagaaaaaataaatgttcatgatttcaagatgttatattaaagaaaaactttaaaaattattatatatttatagcaaagttatcttaaatatgaattctgttgtaatttaatgacttttgaattacagagatataaatgaagtattatctgtaaaaattgttataattagagttgtgatacagagtatatttccattcagacaatatatcataacttaataaatattgtattttagatatattctctaataaaattcagaattctaaaaaaaaaaaaaaaaaaaaaaaaaaaaaa

SEQ ID NO: 173 - DNA, 1416 bp, Homo sapiens
ccagtagcttggaaagtagagatgactaatgttttagccttttcttggagaaaaggaagaactcttcttgaatattttcacagatgattgtgattgctttaaatgacctctgtggcaatttaaattagatggatttaatctcagtaatgtgctggtcgcataaatgtcatgttttaataggaaaagttacttgtaaatctttagacctttgttgtcacttaggctggggagtcactaccctatttggcatcttactagttggggggaccttttccgtgtacagtgatgggacttttgtgacctttactctcactatgcaatagagggtttcatgtagttaatctgacatgtcaaaattgggaagactgtaaccttttttttttttttttaagatttctcttttttgtgtccctcaatacttagcagatgttcatttggtggaaattcttattacttacatgaatgagtttgaatttagtggcaaggaagaaaaaaaaaactcaaattattgttttaaaagaagaaaacttgcaaagtacataagtattttttaaaaatcaatcgaacagaaaggaatgcatgctgtttttcaatggcttagacatgctttttattcactgactagtattcacttttttacaacttgtatcaaaacaaatgatctttgtttttgtcacaggcaaaaacaggttgacactggtgggttggctttattaattaattttttttctattaggttttctttaataatgttaaatttctaaattatagcatatgttttagttaattctgaaatcagttacttcatttgttaatttatccctcatatcatgaatattgttttttaaatkttcctatacmaatttgcatcacttcttttcttacagcttttgcagttwatatattctaaacttgaaaatgtggtatcaatcaataatagaagtatcactggaggatttatttagctttgtatttcttaattttagtcctagctactaaagtatgtaagccttaaagtttaaaatgtttttcttaaattagctttatacacaaacattttcatttactttatgaaatgggaggagatagtccactgtgcttatgtttttttgtttaatttctatattctgaagcagtgcagatatagggtatgctaatcaagtgagcaaggtggaacatgtacaatataaggagaagctgtaaaaatcacagtataaaattatgaagtttggtaactgtaaaatgtactgtatttatatgtaactctcattctaaaagttgccacaaaagctgaattggaagcttcatgtctgcatgaaatttcctatatttttaatgtgtatgatgaaattaatttttcttgaatattaaagtctgccaattgctatgaaamaaaaaaaaaaaaaaaaaactcga

SEQ ID NO: 174 - DNA, 1956 bp, Homo sapiens
  misc_feature (1): n equals a,t,g, or c
  misc_feature (4): n equals a,t,g, or c
  misc_feature (6): n equals a,t,g, or c
  misc_feature (24): n equals a,t,g, or c
nctnantaagggaacaaagctggngctccaccgcggtgccgaccgctctagaactagtggatcccccgggctgcaggaattcggcacgaggatcaaccggatttttaggatatgcaatctaacaagaccacaggaaggttatctgatggtgcaacagtttcagtacctaggatgggcttctcatcgagaagtgcctggttccaaaaggtcattcttgaaactgatacttcaggtggaaaagtggcaggaggaatgcgaggaaggggaaggccggacgattatccactgcctaaatggtggcgggcgaagtggcatgttctgtgctataggcatcgttgttgaaatggtgaaacgggcaaaatgttgtcgatgttttccatgcagtaaagrcactgagggaacagcaagccaaacatggtgggaagccccggagcaataccgtttctgctatgatgtagctttggagtacctgggaatcatcttagttgggtgagactctttaaagtgcatccatgaagraacctgtccatctattgagccagcagctgttgtacctgttacacttgtgcagaaagattttaatgtggggggtgggagacttttacatttgagaggtaaaagtattttttttatgaagttgtgtatcttaataaaaaggactgaattagtttttattactatattaaagcatcaacatttcatgccacataaattatatttaataagaaccagattgaaatgagaacgtattggtgtttgtacagtgaacatgccaccttttttctcatggtttcagtagagcagctaccacatgttgcatgagttcatactttctacgtggcatttttctccctttctaaaatgaaagctgatgaatcttaaaaggaagaagaaaagaaaagctgtgcaaattcatagtaaagttcgttttttatatgtttccagtgtagcagatctctatataaatatataaatatatataactggcttattttcttttaatgtgcaatgatggctggatcattttaaaaaaaaagggttctttttagaaaataacataagccaaagactcaagtgtaaatatgtctatatggagaaagcacattatatttattggttacttacattccttttttgatggctaaaatactaccaccacacaatcatcttttttttcctgaagaaagctttttctttagctaaaatcaattgtaaacgatttttgtagattattttttgtatgttttagtgtaagtagaagataaactttttattcataaaccaggaagcaatgttctttatagtgattctcttgtgtacatgcttgtgaattaaatttgtgtaaaatcccttggcaattgggtcttttaatataggaccaaattaaaacattttgctgaatatgtatagtttttcacaatttcattaggtaaataatggtttggtgatcatacatgagaaatgtacacattaaaaggccttgctgacaacttgcacaatgttgaacatagcctttaagcatcatttaaattttaaaggaatggagtttttcagcctgtggcccagcactggtcaagaaaacaagatggcaacatatatgctttcagggtcaaatttgagcaaactgtaaactgtcagggtgataaaatgtttctcttgatgtttacatgcacaagctttgcgttctgactataaaaagtgtgaacaaatcaatgccagattcctgttttgcgcattgtcatgggattcttaagtgaacctttctaaatgtggtcttgttcacatgctccacgtagctgtaacttcacatcatcagcttgcagtttgtaattgactaaagcattccagtgtcctctttctagattgccagctcatgacatggtgcttataaagatttaattaaagtaagaatgaaataaagtttttataattataaaaaaaaaaaaaaaaaaactc

SEQ ID NO: 175 - DNA, 1689 bp, Homo sapiens
  misc_feature (1688): n equals a,t,g, or c
  misc_feature (1689): n equals a,t,g, or c
ggctgcaggtcgacactagtggatccaaagaattcggcasakctcttattcctcactttccacccccgtattttgtaatgaccatgagcaatgtttttactttttgtataatggggtggggtggagtgggggcttctgagagtcagcctgaggtctttagaggaccagctattgtagcaccttggatacttgaagtttaatgctcagttgggtcgggtggcagttgacttggtggctggcatgttcagcagtgcctggggccctgtttctgggcagcctttgaggattttctatgatattgaatgacagttttaagtggcaactcaggcccagctcatgcccttttttgcctggacatgtgctatttttattcacttatatatcaattacttgtaagggttaaactttcaaacaggaagtatattgggacaaaagggctcttggggattagatatccctttaatctgtgaccattgggcaaaaaattttcctgcagcaaaagtctgaggctgttgggaccatttttgcagctttaatccttagcctcttttgactgtatatttgtgtttaaaatgcagagctcaactgaatatttccttttttgttttgttttgttttgttttaagaagtaggttgttttcctgaaccgtaaacttgtatcattttaacttgcacaaaggaagtctgttcttggtattgctcttgcacttgggttttttgttattgttttgtgtggattttttaaagcttttctgttcaccctcctgccaggaaaatcccagaaagcttaatgataccccaaaatgattacacccagggaggaaaaaaaggagcgctttctagggtcagaatcgtggagagaatactcagaaatgaacctctttaaagccttgcaggaatgagtcactcttacttaatgaaatgttaaagccaattaaaaagcatgctgtgatgcccagcttccctttccacagggtgcatgcgtctcctgctggtgaatcacatgcggcaagaggcaactggctccacagcctgggatgctgccgtaccaagaggaaagaagcagcaaaatgcctttacgttgttctaaacccccgacgcataaagtgtagaggagggatggccaagggtgggtggtagaaagtgtgttcaggctgacactggcaatgagtacagataatttcactttcctcttccaggggcaaaggctgatggcctctacctttgtatccaggagaaactgcagagcagccctgtgactttacaaaatatgctacctcaaagtgctaccgataaacctttctaattgtaagksccttactaagggcacatgtcttaatcaaagttagttttttgttttctggtttgtttttttttttttgtatattgatgaatgagatcttacctattaaatatattattggattatggttcctgaaggtcattagagtgtgtgtgtgtgtgtgtgtgtgtgtgtgtgttttatgacttaaatatctttacgtgtgttttttagagcttggttctttaaagatttggagaagatatgtaaattaccaaggcacttggtttttctgttttatatactaataatcagggcctaagttaaataaaaatatgtgtgcatgtattttaaaaaaaaaaaaaaaaaaaaaaaaaaaaaaaaaaaaaaaaaaaaaaaaaaaaann

SEQ ID NO: 176 - DNA, 1016 bp, Homo sapiens
  misc_feature (895): n equals a,t,g, or c
  misc_feature (928): n equals a,t,g, or c
  misc_feature (970): n equals a,t,g, or c
  misc_feature (992): n equals a,t,g, or c
  misc_feature (1001): n equals a,t,g, or c
taagagagctttgcaaaaaaaaaaagaaaaaagaaaaaaaaaaaaccacgtttctttgttgagctgtgtcttgaaggcaaaagaaaaaaaatttctacagtagtctttcttgtttctagttgagctgcgtgcgtgaatgcttattttcttttgtttatgataatttcacttaactttaaagacatatttgcacaaaacctttgtttaaagatctgcaatattatatatataaatatatataagataagagaaactgtatgtgcgagggcaggagtatttttgtattagaagaggcctattaaaaaaaaaagttgttttctgaactagaagaggaaaaaaatggcaatttttgagtgccaagtcagaaagtgtgtattaccttgtaaagaaaaaaattacaaagcaggggtttagagttatttatataaatgttgagattttgcactattttttaatataaatatgtcagtgcttgcttgatggaaacttctcttgtgtctgttgagactttaagggagaaatgtcggaatttcagagtcgcctgacggcagagggtgagcccccgtggagtctgcagagaggccttggccaggagcggcgggctttcccgaggggccactgtccctgcagagtggatgcttctgcctagtgacaggttatcaccacgttatatattccctaccgaaggagacaccttttcccccctgacccagaacagcctttaaatcacaagcaaaataggaaagttaaccacggaggcaccgagttccaggtagtggttttgcctttcccaaaaatgaaaataaactgttaccgaaggaattagtttttcctcttcttttttccaactgtgaaggtccccgtggggtggagcatggtgcccctcacaagccgnacggctggtgcccgggctaccagggacatgccngagggctcgatgacttgtctctgcagggcgctttggtggtgnttaactggctaaaggttaccgntgaaggcangtgcggtaactggcc

SEQ ID NO: 177 - DNA, 1364 bp, Homo sapiens
gaatcccactcccttctcccacttgttaattagttacatacttttttgtaattgtttatttggttgctgtctccctctcaagaatgcagggaccatgtctgcattctgcagtaatcactactgcacacccagaatctattacagatcctggcatgtagctgatgcataaatatttgttgaatgaaagtctgtacattgtatttatgctattggtattgctatgacctgaaactaaaaggagttgtggaaaagatttcttatggaacagaaatatcccttttgattaatatcacaatctcgtaaattgagaaaacaaawaatatatactactggagcattcatgtatagttggagattatgactcatttattggtgtgtttttggactcagaacaaagatgagggaatattccttaaagctctgtattgaaataacgaaaagcagtcacattttaataatagaagcttcctagcttactctttctgtaatcttcttttcctaaatgtaagagagcctcataattatgaggcttattactagagtaaggctgtcaaaggcagcaaaatgtctttctgtttggaagaataacataaacttgacatgtatggtgggggacagaaggtttcaaaagtttaagaatctgtgttgtcttaacaaatagatgcttctcaaggassttacgytagtggttactctgtccagtcagggttttttcttctttaacttgggttcatttcctgatggcacacatgaagtttggatcatatggtttgactttagctatggtccttagctatggggagcagcatcagcgacctgtgacatgtaaattaaaaatacaatgccagggcccttccccagcccctctgatagagaacctcttggccatctgtatttttagatgttccaggttagtctgattaacacccttggttaagaaccattgggaggatctgattgccagtttaaggggaccttcaagcctgtaggtctttatagttaaaaaaaaaaaaagattttaaaaatcatgcatatgttgtggctgaawtctggtttagcacatactgcttttaatggcctgaaatgtttttcccaaataaattstcttgttatagctttcatgtgtgatttggtccagcttcttgttttgaagatacttacgggggggaacactttgtgatttctcttagtaacatattaacccacttaaaaaccctttctattacaggtcttcacatttaggcttaatgtgcttaattcaaatgtaaaaatacacctgcctttgttctcagtgaaagtatgtaataaataaatgaggggttggcaaactactgcccaccatctgtttttttatggcctatgaa

SEQ ID NO: 178 - DNA, 740 bp, Homo sapiens
  misc_feature (38): n equals a,t,g, or c
  misc_feature (171): n equals a,t,g, or c
tggctgggactccaggcgcataccaccatgactggctnatttttgtgtttttagtagagacggggtttcaccatgttggccaggctggtcttgaacttctggccccaagtcatctgcctgcctcagcctcccaaggtgctgggattacaagtgtgagccactgtgtacagnctttgtgttaacttactttgaattagccccttattccaaagctgcctcctgaaaggasgcttcctaaaaggtgttgctttggggtaaataagaggtgctggtgaagtgagactagcttgcgcatctctctgccatgaaggaaactagctccgcagacgttttactaaccacagcagaccccctccttgaggaacccagaagggcagagagcatcagatgaaatcaactgctgagagagggaagtgagtgctgtgttggcaccgctgccagaaactcttgagaatgagcatcgtgtgccacttatccactgcttgccgacttcagtagcaagagcctccagaatgctcatggataaacatcatctttgtggccacacattgttttatgagctgagtcatcagactggctggctccttaaatgctgctgtgtgattctctaggcagcagaaaacaaggagagaagatatgaagtgtatctcatcgagctttgtagagggccagtatcgattcaccaaaggtgatgggggatttaccattatggagtttgcttgtgataaaaaattattgat

SEQ ID NO: 179 - DNA, 1410 bp, Homo sapiens
gaaaatgtatataataggcaaggaaagaaatacagtactgtttctggacccttataaaatcctgtgcaatagacacatacatgtcacatttagctgtgctcagaagggctatcatcaycctacaactcacattagagaacatcctggcttttgagcacttttcaaacaatcaagttgactcacgtgggtcctgaggcctgcagcacgtcggatgctaccccactatgacagaggattgtggtcacaacttgatggctgcgaagacctaccctccgtttttctactagataggaggatggtagaagtttggctgctgtcataacatccagagcyttgtcgtatttggcacacagcagaggcccagatattagaaaggctctattccaataaactatgaggactgccttatggatgatttaagtgtctcactaaagcatgaaatgtgaatttttattgttgtacatacgatttaaggtatttaaagtattttcttctctgtgagaaggtttattgttaatacaaggtataataaaattatcgcaacccctctccttccagtataaccagctgaagttgcagatgttagatatttttcataaacaagttcgagtcaaagttgaaaattcatagtaagattgatatctataaaatagatataaatttttaagagaaagaatttagtattatcaaagggataaagaaaaaaatactatttaagatgtgaaaattacagtccaaaatactgttctttccaggctatgtataaaatacatagtgaaaattgtttagtgatattacatttatttatccagaaaactgtgatttcaggagaacctaacatgctggtgaatattttcaactttttccctcactaattggtacttttaaaaacataacataaattttttgaagtctttaataaataacccataattgaagtgtataatataaaaaattttaaaaatctaagcagcttattgtttctctgaaagtgtgtgtagttttactttcctaaggaattaccaagaatatcctttaaaatttaaaaggatggcaagttgcatcagaaagctttattttgagatgtaaaaagattcccaaacgtggttacattagccattcatgtatgtcagaagtgcagaattggggcacttaatggtcaccttgtaacagttttgtgtaactcccagtgatgctgtacacatatttgaagggtctttctcaaagaaatattaagcatgttttgttgctcagtgtttttgtgaattgcttggttgtaattaaattctgagcctgatattgatatggttttaagaagcagttgtaccaagtgaaattattttggagattataataaatatatacattcaaaaaaaaaaaaaaaaaaaaaaaaaaaaaaaaaraaaaaaa

SEQ ID NO: 180 - DNA, 1493 bp, Homo sapiens
  misc_feature (1328): n equals a,t,g, or c
  misc_feature (1352): n equals a,t,g, or c
  misc_feature (1376): n equals a,t,g, or c
  misc_feature (1406): n equals a,t,g, or c
  misc_feature (1436): n equals a,t,g, or c
  misc_feature (1484): n equals a,t,g, or c
ggccaaatcttcccgggctgctgtgggcaacaagatgtttgtcaagggtgcccctgagggcgtcatcgaccgctgtaactatgtgcgagttggcaccacccgggtgccactgacggggccggtgaaggaaaagatcatggcggtgatcaaggagtggggcactggccgggacaccctgcgctgcttggccctggccacccgggacacccccccgaagcgagaggaaatggtcctggatgactctgccaggttcctggagtatgagacggacctgacattcgtgggtgtagtgggcatgctggaccctccgcgcaaggaggtcacgggctccatccagctgtgccgtgacgccgggatccgggtgatcatgatcactggggacaacaagggcacagccattgccatctgccggcgaattggcatctttggggagaacgaggaggtggccgatcgcgcctacacgggccgagagttcgacgacctgcccctggctgaacagcgggaagcctgccgacgtgcctgctgcttcgcccgtgtggagccctcgcacaagtccaagattgtggagtacctgcagtcctacgatgagatcacagccatgacaggtgatggcgtcaatgacgcccctgccctgaagaagctgagattggcattgccatgggatctggcactgccgtggccaagactgcctctgagatggtgctggctgacgacaacttctccaccatcgtarctgctgtggaggarggccgcgccatctacaacaacatgaagcagttcatccgctacctcatttcctccaacgtgggcgaggtggtctgtatcttcctgaccgctgccctggggctgcctgaggccctgatcccggtgcagctgctatgggtgaacttggtgaccgacgggctcccagccacagccctgggcttcaacccaccagacctggacatcatggaccgccccccccggagccccaaggagcccctcatcagtggctggctcttcttccgctacatggcaatcgggggctatgtgggtgcagccaccgtgggagcagctgcctggtggttcctgtacgctgaggatgggcctcatgtcaactacagccagctgactcacttcatgcagtgcaccgaggacaacacccactttgagggcatakactgtgaggtcttcgaggcccccgagcccatgaccatggccctgtccgtgctggtgaccatcgagatgtgcaatgcactgaacagcctgtccgaraaccagtccctgctgcggaattgcmacccctggggttraacaattcttgggctggctgggsttccattcttggncttcttccaatgttcccctggcancttccctcaattccctcctaatgnttgaaccccccttgcccgaatgaatctttnaaggcttccggggcccttggaaccttcaanccaagttgggttaatggttcctccaagattttcaattggccagttaantgggggttc

SEQ ID NO: 181 - DNA, 2040 bp, Homo sapiens
gcatgagctcatgcaagaggcaggggatgagtgtgagcccgagtggtgtgatgccgaggacccactcttcatcctgtacaccagtggctccacaggcaaacccaagggtgtggttcacacagttgggggctacatgctctatgtagccacaaccttcaagtatgtgtttgacttccatgcagaggatgtgttctggtgcacggcagacattggttggatcactggtcattcctacgtcacctatgggccactggccaatggtgccaccagtgttttgtttgaggggattcccacatatccggacgtgaaccgcctgtggagcattgtggacaaatacaaggtgaccaagttctacacagcacccacagccatccgtctgctcatgaagtttggagatgagcctgtcaccaagcatagccgggcatccttgcaggtgttaggcacagtgggtgaacccatcaaccctgaggcctggctatggtaccaccgggtggtaggtgcccagcgctgccccatcgtggacaccttctggcaaacagagacaggtggccacatgttgactccccttcctggtgccacacccatgaaacccggttctgctactttcccattctttggtgtagctcctgcaatcctgaatgagtccggggaagagttggaaggtgaagctgaaggttatctggtgttcaagcagccctggccagggatcatgcgcacagtctatgggaaccacgaacgctttgagacaacctactttaagaagtttcctggatactatgttacaggagatggctgccagcgggaccaggatggctattactggatcactggcaggattgatgacatgctcaatgtatctggacacctgctgagtacagcagaggtggagtcagcacttgtggaacatgaggctgttgcagaggcagctgtggtgggccaccctcatcctgtgaagggtgaatgcctctactgctttgtcaccttgtgtgatggccacaccttcagccccaagctcaccgaggagctcaagaagcagattagagaaaagattggccccattgccacaccagactacatccagaatgcacctggcttgcctaaaacccgctcagggaaaatcatgaggcgagtgcttcggaagattgctcagaatgaccatgacctcggggacatgtctactgtggctgacccatctgtcatcagtcacctcttcagccaccgctgcctgaccatccagtgaacatgatcctgacctttacctaggattcctcctgctccaaactttgcccatcctctttgccccctcaggagtgctgagggccagtgttgacccacactaccctcccttgaccagctgtctgggaccggaaaccagctttgtctccaggtagagacaacatcctgtgactgccaggcagaaaggacagggcccaggtcagcctcagtctgctgtgcctccagactgcagagctctcagaacccagaacagagacgaaaaggctacctctcctacccaagttaagtgttcaaaggggatgtgagggcctccactgaagcagggaggcagctgtgtaatcctatgtcagctctcttaggaagccccagtacttatattgggcatgcacttgcccttaaaaacaatgatttgtgagtccaggaacaatttactatttttaaaatattttgctgcttctgttctgggtctgaattcccttttgtgccagatgccagtactgtctgcccattggctccaggggctgtatgggcagattcagtctccagagggtattcagatcatctgcttctttgaaggagtaaatgtgttttgttcctagggccagaggagcttgtcttccttgtcctctgttcccaccctcccctgaacagaacccagcccataagagacattctcagatgaaactctgttttcttgccccagtcaggctcaagccctgtggttgtaggaataaagcctgtgatctcaaaaaaaaaaaaaaaaaaaaaaaaaaaaaaaaaaaaaaaaaaaaaaaaaaactcgaa

SEQ ID NO: 182 - DNA, 969 bp, Homo sapiens
  misc_feature (11): n equals a,t,g, or c
  misc_feature (128): n equals a,t,g, or c
agacagttctnattctccccagggcagggagcaggttatgaccaggactaaggtcccaaagtccccaccctgaacccctccctgctgttccaccgctccctcatatccacccctgccccatctcctgnactttggtcacgctagcatcttctgctgatcctgaaattgtaccagcggcaagatgtggcctggaaggggactttaagttctccacaactgccagcaatccttccaccaggcaaaacacatcatctaaggaaaagaagtgaggtttgcttagggcgtggcagcttcggataaacgcaggactccgcctggcagcccgatttctcccggaacctctgctcagcctggtgaaccacacaggccagcgctctgacatgcagaaggtgaccctgggcctgcttgtgttcctggcaggctttcctgtcctggacgccaatgacctagaagataaaaacagtcctttctactatgactggcacagcctccaggttggcgggctcatctgcgctggggttctgtgcgccatgggcatcatcatcgtcatgagtgagtggaggagctcgggggagcaggcgggccggggctggggctcccctcccctgaccactcagctctccccaacaggtgcaaaatgcaaatgcaagtttggccagaagtccggtcaccatccaggggagactccacctctcatcaccccaggctcagcccaaagctgatgaggacagaccagctgaaattgggtggaggaccgttctctgtccccaggtcctgtctctgcacagaaacttgaactccaggatggaattcttcctcctctgctgggactcctttgcatggcagggcctcatctcacctctcgcaagagggtctctttgttcaattttttttwatctaaaatgattgtgcctctgcccaaaaaaaaaaaaaaaaaaaaaaaaaaaaaaaaaaaaaaaaaaaaaaaga

SEQ ID NO: 183 - DNA, 1452 bp, Homo sapiens
  misc_feature (17): n equals a,t,g, or c
  misc_feature (18): n equals a,t,g, or c
  misc_feature (1430): n equals a,t,g, or c
  misc_feature (1441): n equals a,t,g, or c
gtcgacccacgcgtccnnccacggtccggtggggagaagccgggaggactgggtgcgcctgcagggatcggaagccggttggggtgtgagaggttttctcgctctagggagattcttcaagcaatcactatgtcaacagacacaggtgtttcccttccttcatatgaggaagatcagggatcaaaactcattcgaaaagctaaagaggcaccattcgtacccgttggaatagcgggttttgcagcaattgttgcatatggattatataaactgaagagcaggggaaatactaaaatgtccattcatctgatccacatgcgtgtggcagcccaaggctttgttgtaggagcaatgactgttggtatgggctattccatgtatcgggaattctgggcaaaacctaagccttagaagaagagatgctgtcttggtcttgttggaggagcttgctttagttagatgtcttattattaaagttacctattattgttggaaataaactaatttgtatgggtttagatggtaacatggcattttgaatattggcttcctttcttgcaggcttgatttgcttggtgaccgaattactagtgactagtttactaactaggtcattcaaggaagtcaagttaacttaaacatgtcacctaaatgcacttgatggtgttgaaatgtccaccttcttaaatttttaagatgaacttagttctaaagaagataacaggccaatcctgaaggtactccctgtttgctgcagaatgtcagatattttggatgttgcataagagtcctatttgccccagttaattcaacttttgtctgcctgttttgtggactggctggctctgttagaactctgtccaaaaagtgcatggaatataacttgtaaagcttcccacaattgacaatatatatgcatgtgtttaaaccaaatccagaaagcttaaacaatagagctgcataatagtatttattaaagaatcacaactgtaaacatgagaataacttaaggattctagtttagttttttgtaattgcaaattatatttttgctgctgatatattagaataatttttaaatgtcatcttgaaatagaaatatgtattttaagcactcacgcaaaggtaaatgaacacgttttaaatgtgtgtgttgctaattttttccataagaattgtaaacattgaactgaacaaattacctataatggatttggttaatgacttatgagcaagctggtttggccagacagtatacccaaacttttatataatatacagaaggctatcacacttgtgaaattctcttgtctaatctgaatttgcattccatggtgttaacatggtatatgtattgttattaaagtaagtgacccatgtcaaaaaaaaaaaaaaaaaaaaaaaaaaaaaaaaaaaaaaaaaaaaaaaanaaaaaaaaaanaaaaaaaaaaa

SEQ ID NO: 184 - DNA, 2119 bp, Homo sapiens
  misc_feature (2090): n equals a,t,g, or c
aaattgaaacttctaataaaaatgatatgactatagatatattacatgctgatggtgaaagacctaatgttctagaaaacctagacaactcaaaggaaaagactgttggatcagaagcagcaaaaactgaagatacagttctctgcagcagtgatacagatgaggagtgtttaatcattkwtacagaatgtaaaaataatagtgatggaaagacagctgttgtgggttctaacttaagttccagaccagctagtccaaattcttcctcaggacaggcttctgtaggaaaccagactaatactgcttgtwgtcctgaagagtcatgtgttttaaaaaaacctatcaaacgagtatataaaaaatttgatccagttggagagattttaaaaatgcaggatgagctcttwaagccaatttccagaaaagtaccagaattgcccttaatgaatttagaaaattctaaacagccttctgtttctgagcaattgtctggtccttcagactcctctagttggccgaaatctggatggccttctgcatttcagaagccaaaaggacgattgccatatgaacttcaggactatgttgaagatacatcggaatacctagctcctcaggaaggaaattttgtttataagttatttagcctgcaagacctgttgttactcgtacgctgcagtgtccagaggatagagacaagaccacgttctaaaaaacggaagawwatyagaagacaatttccagtttatgtactaccaaaagtagagtatcaagcttgttatggagttgaagctctgactgaaagtgaactttgtcgcttatggactgaaagtttattgcattccaacagctcattttatgttgggcatatcgatgcatttacttcaaaactttttctactggaagaaattacctcagaagaattaaaagaaaagctttcagcactcaagatttccaatttatttaacatcctccaacacattctaaagaaactaagtagcttgcaggagggttcctacttgttatctcatgcagcagaagattcttcactcctgatttataaggcctctgatggaaaagttactaggacagcatacaatttgtataaaacacattgcggccttcctggtgtaccttccagtctctcagttccctgggtcccattagatcccagcctgttattaccatatcatatccatcatggaagaataccttgtacttttccaccgaaatcactggataccacaacacaacaaaagattggtggaacgagaatgcctacacgcagccacaggaatccagtttccatggaaaccaaaagcagttgcttgcctgctcagcaagttgaaactgaaggagtggctccacataaaagaaaaataacttgaggactgtaccatggaaaactaaatttaaaaaamcagttataacagtgtttaatttagataagtttgagggaaaataatcagtaggcaagaggaacatttttcctgtagtagctagagtgccttgaaaaaatgtgttggctatgtgaaggaatatttcaactaaaatggaatggtatgcttttcacccttraagtttgaggaggatcttgatatgttttaacattatcatggcagggaaatatataaagaagaaaaatatttttacattaaaccttttctaaaaattgtaaatagaaaaataatttggttttttatcaagaacaacacttatcgttatgtattgtgttagttatattgccagtctgttgcgactgactcaaaaagttaaatgttgccactgctgaagatgattatgagcatcgcaaactttgtttctgacccattttgacagtttttatatactcctttaaaatgatgaatgttacaggttaataaagttaatacctttaaaaacttggtgaaattccattacagaagccaaaaataaaaactccctgcctctgaaaagtcagattactgacttcttgtttggcaaccatcagtttgtttaataaaagaaaaaatttggtggtataacatgtttgatgacagatgcctctatctctagattcaagctgagtgttgaaatacactgctgaaagnaagagataggtatgttttccagaaaaaaa

SEQ ID NO: 185 - DNA, 1325 bp, Homo sapiens
  misc_feature (21): n equals a,t,g, or c
  misc_feature (1319): n equals a,t,g, or c
  misc_feature (1320): n equals a,t,g, or c
atgactggggagcgacccagncacggcgctcccgggacagacgctgggggccscggaatctctccctggatattggcactgaagtgtttgcccctggaccgggctctggtattcagaaacagcgggagccacggaagggccgcctcatcgtgtgtggccatgggacgctggagcgggacggagtcttctgtctcctcagcgatgatcatggtgcctcctggcgctacggaagtggggtcagcggcatcccctacggtcagcccaagcaggaaaatgatttcaatcctgatgaatgccagccctatgagctcccagatggctcagtcgtcatcaatgcccgaaaccagaacaactaccactgccactgccgaattgtcctccgcagctatgatgcctgtgatacactaaggccccgtgatgtgaccttcgaccctgagctcgtggaccctgtggtagctgcaggagctgtagtcaccagctccggcattgtcttcttctccaacccagcacatccagagttccgagtgaacctgaccctgcgatggagcttcagcaatggtacctcatggcggaaagagacagtccagctatggccaggccccagtggctattcatccctggcaaccctggagggcagcatggatggagaggagcaggccccccagctctacgtcctgtatgagaaaggccggaaccactacacagagagcatctccgtggccaaaatcagtgtctatgggacactctgagctgtgccactgccacaggggtattctgccttcaggactctgccttcaggaacacgggtctgtagagggtctgctggagacgcctgaaagacagttccatcttcctttagactccagccttggcaaaatcaccttccctttaccagggaaatcacttcctttaggactgaaagctaggcgtcctctcccacaaaaaagtcctgccctcatctgagaatactgtctttccatatggctaagtgtggccccaccaccctctctgcctcccgggacattgattggtcctgtcttgggcaggtctagtgagctgtagaattgaatcaatgtgaactcagggaactggggaaggctgagcctcctctttggtgttgcggtaagataaccgacagggctggtgaaagtccccagatggcaggatatttggtttcagagtaaggactaggtgcaccaccatgactgactatcaatcaaaatgtttgtaacttaaaatttttaatgaaggataatgaatattaaaaaaaaaaaaaaaaaaaaaaaaaaaaaaaaaaaaaaaaaaaaaaaaaaaaaaannaaaaa

SEQ ID NO: 186 - DNA, 433 bp, Homo sapiens
aattcggcacgagggcgcaggccccagccagctcaggctacactatcccaggatcagcatggccgtccgccagtgggtaatcgccctggccttggctgccctccttgttgtggacagggaagtgccagtggcagcaggaaagctccctttctcaagaatgcccatctgtgaacacatggtagagtctccaacctgttcccagatgtccaacctggtctgcggcactgatgggctcacatatacgaatgaatgccagctctgcttggcccggataaaaaccaaacaggacatccagatcatgaaagatggcaaatgctgatcccacaggagcacctcaagccatgaagtgtcagctggagaacagtggtgggcatggagaggatatgacatgaaataaaagatccagcccaaaaaaaaaaaaaaaaaaaaaaaa

SEQ ID NO: 187 - DNA, 859 bp, Homo sapiens
  misc_feature (803): n equals a,t,g, or c
  misc_feature (853): n equals a,t,g, or c
cccacgcgtccgcccacgcgtccgcccacgcgtccgaccggggcttttcgtgagctcgtctctgatctcgcgcaagagtgacacacaggtgttcaaagacgcttctggggagtgagggaagcggtttacgagtgacttggctggagcctcaggggcgggcactggcacggaacacaccctgaggccagccctggctgcccaggcggagctgcctcttctcccgcgggttggtggacccgctcagtacggagttggggaagctctttcacttcggaggattgctcaacaaccatgctgggcatctggaccctcctacctctggttcttacgtctgttrctagattatcgtccaaaagtgttaatgcccaagtgactgacatcaactccaagggattggaattgaggaagactgttactacagttgagactcagaacttggaaggcctgcatcatgatggccaattctgccataagccctgtcctccaggtgaaaggaaagctagggactgcacagtcaatggggatgaaccagactgcgtgccctgccaagaagggaaggagtacacagacaaagcccatttttcttccaaatgcagaagatgtagattgtgtgatgaaggacatggcttakaagtggaaataaactgcacccggacccagaatmccaagtgcagatgtaaaccaaactttttttgkaactctactgtatgtgaacactgtgacccttgcaccaaatgtgaacatggaatcatcaaggaatgcacactcaccagcaacaccaagtgcaaagaggaaggatccanatctaacttggggtggctttggcttcttcttttgccaattccctaattgnttgggt

SEQ ID NO: 188 - DNA, 833 bp, Homo sapiens
  misc_feature (65): n equals a,t,g, or c
  misc_feature (798): n equals a,t,g, or c
  misc_feature (803): n equals a,t,g, or c
  misc_feature (809): n equals a,t,g, or c
  misc_feature (812): n equals a,t,g, or c
tcgcagagattacaccactgcaacgagactcgggcccagacgagatctgcctgggcgacacagtnagactctgtctcaaaataaataaataagtaaatagaacctcctgagctaccctggcttataaggattcagattactttaggaaattaggcattagcactaggaggggggaagatggctggcaaaacttctagctagcaacctatgtctagcacatgggtaactaaccatagcgagatcctgaacacatatcctctaggtgcaggtggagggaacgatgtccaatacctgaagcagaatctcacatggacggaacgtctgtatttccctctcctgcacgaatcactcatcattcttggagggcttctctgcattcctccttttcttctctcccctcccctgccttttgtcttttctaaagagtctgaactccgatttccatgctctcctgctacattaataagcaaaacctgcttgtgtgtacggttctttactggaaacatgactttttgtttctgtattggttttactgtcatccagttttctagtttaatatctagcaaaactaaatctgaatgtactcgctttttccgttaagtatgccaagcacctcggttgaaaggcttgactcaaaccagaagtcttgctggaattcgtctctgaacacttgaaaaacagaaaccctgagccgcaacaaacatgcctctgtgtgtcgggattgcctttgtctctgcttccatgtggcttttccttttgtagctatgcttagtgacataatcttccctcttcaagcantctgngttggnccnttcccgttcccccccccgtgc

SEQ ID NO: 189 - DNA, 2211 bp, Homo sapiens
ggcacgaggagtacagggcccgcgcatgcgtggattgtcgtcttctgtccaagttggtcgcttccctgcgccaaagtgagcagtagccaacatgtcagggtgggagtcatattacaaaaccgagggcgatgaagaagcagaggaagaacaagaagagaaccttgaagcaagtggagactataaatattcaggaagagatagtttgatttttttggttgatgcctccaaggctatgtttgaatctcagagtgaagatgagttgacaccttttgacatgagcatccagtgtatccaaagtgtgtacatcagtaagatcataagcagtgatcgagatctcttggctgtggtgttctatggtaccgagaaagacaaaaattcagtgaattttaaaaatatttacgtcttacaggagctggataatccaggtgcaaaacgaattctagagcttgaccagtttaaggggcagcagggacaaaaacgtttccaagacatgatgggccacggatctgactactcactcagtgaagtgctgtgggtctgtgccaacctctttagtgatgtccaattcaagatgagtcataagaggatcatgctgttcaccaatgaagacaacccccatggcaatgacagtgccaaagccagccgggccaggaccaaagccggtgatctccgagatacaggcatcttccttgacttgatgcacctgaagaaacctgggggctttgacatatccttgttctacagagatatcatcagcatagcagaggatgaggacctcagggttcactttgaggaatccagcaagctagaagacctgttgcggaaggttcgcgccaaggagaccaggaagcgagcactcagcaggttaaagctgaagctcaacaaagatatagtgatctctgtgggcatttataatctggtccagaaggctctcaagcctcctccaataaagctctatcgggaaacaaatgaaccagtgaaaaccaagacccggacctttaatacaagtacaggcggtttgcttctgcctagcgataccaagaggtctcagatctatgggagtcgtcagattatactggagaaagaggaaacagaagagctaaaacggtttgatgatccaggtttgatgctcatgggtttcaagccgttggtactgctgaagaaacaccattacctgaggccctccctgttcgtgtacccagaggagtcgctggtgattgggagctcaaccctgttcagtgctctgctcatcaagtgtctggagaaggaggttgcagcattgtgcagatacacaccccgcaggaacatccctccttattttgtggctttggtgccacaggaagaagagttggatgaccagaaaattcaggtgactcctccaggcttccagctggtctttttaccctttgctgatgataaaaggaagatgccctttactgaaaaaatcatggcaactccagagcaggtgggcaagatgaaggctatcgttgagaagcttcgcttcacatacagaagtgacagctttgagaaccccgtgctgcagcagcacttcaggaacctggaggccttggccttggatttgatggagccggaacaagcagtggacctgacattgcccaaggttgaagcaatgaataaaagactgggctccttggtggatgagtttaaggagcttgtttacccaccagattacaatcctgaagggaaagttaccaagagaaaacacgataatgaaggttctggaagcaaaaggcccaaggtggagtattcagaagaggagctgaagacccacatcagcaagggtacgctgggcaagttcactgtgcccatgctgaaagaggcctgccgggcttacgggctgaagagtgggctgaagaagcaggagctgctggaagccctcaccaagcacttccaggactgaccagaggccgcgcgtccagctgcccttccgcagtgtggccaggctgcctggccttgtcctcagccagttaaaatgtgtttctcctgagctaggaagagtctacccgacataagtcgagggactttatgtttttgaggctttctgttgccatggtgatggtgtagccctcccactttgctgttccttactttactgcctgaataaagagccctaagtttgtactataaaaaaaaaaaaaaaaaaaaaaaaaaagtcgaccggccgttaatttagtagtagtaggcggccgc

SEQ ID NO: 190 - DNA, 1659 bp, Homo sapiens
  misc_feature (1582): n equals a,t,g, or c
atcgggttcaagaagaaaatgctaggcttaagaagaaaaaagagcagttgcagcaggaaatcgaagactggagtaaattacatgctgagctcagtgagcaaatcaaatcatttgagaagtctcagaaagatttggaagtagctcttactcacaaggatgataatattaatgctttgactaactgcattacacagttgaatctgttagagtgtgaatctgaatctgagggtcaaaataaaggtggaaatgattcagatgaattagcaaatggagaagtgggaggtgaccggaatgagaagatgaaaaatcaaattaagcagatgatggatgtctctcggacacagactgcaatatcggtagttgaagaggatctaaagcttttacagcttaagctaagagcctccgtgtccactaaatgtaacctggaagaccaggtaaagaaattggaagatgaccgcaactcactacaagctgccaaagctggactggaagatgaatgcaaaaccttgaggcagaaagtggagattctgaatgagctctatcagcagaaggagatggctttgcaaaagaaactgagtcaagaagagtatgaacggcaagaaagagagcacaggctgtcagctgcagatgaaaaggcagtttcggctgcagaggaagtaaaaacttacaagcggagaattgaagaaatggaggatgaattacagaagacagagcggtcatttaaaaaccagatcgctacccatgagaagaaagctcatgaaaactggctcaaagctcgtgctgcagaaagagctatagctgaagagaaaagggaagctgccaatttragacacaaattattagawttaacacaaaagatggcaatgctgcaagaagaacctgtgattgtaaaaccaatgccaggaaaaccaaatacacaaaaccctccacggagaggtcctctgagccagaatgtcttttggcccatcccctgtgagtggtggagaatgctcccctccattgacagtggagccacccgtgagacctctctctgctactctcaatcgaagagatatgcctagaagtgaatttggatcagtggacgggcctctacctcatcctcgatggtcagctgaggcatctgggaaaccctctccttctgatccaggatctggtacagctaccatgatgaacagcagctcaagaggctcttcccctaccagggtactcgatgaaggcaaggttaatatggctccaaaagggccccctcctttcccaggagtccctctcatgagcacccccatgggaggccctgtaccaccacccattcgatatggaccaccacctcagctctgcggaccttttgggcctcggcacttcctccaccctttggccctggtatgcgtccaccactaggcttaagagaatttgcaccaggcgttccaccaggaagacgggacctgcctctccaccctcggggatttttacctggacacgcaccatttagacctttaggttcacttggcccaagagagtactttattcctggtacccgattaccacccccaacccatggtccccaggaatacccaccamcacctgnttgttaargagratttatkgcgttcagtgttagagatgaggcctcaactggcttcttagaggcattagccagggatt

SEQ ID NO: 191 - DNA, 3894 bp, Homo sapiens
cacacttgaagctgaaaaagaaagaagaaaatctgggctatcctcaagagttcagtttcgaaaccaaggttctgagcccaaatatactcaagaactaactctgaagaggcagaaacagaaagtgtgcatggaggaaaccctgtggctacaggataatatcagagataaactgcgtcccattcccataactgcctcagtggagatccaagagccaagctctcgtaggcgagtgaattcacttccagaagttcttccaattctgaattcagatgaacccaagacagctcatattgatgttcacttcttaaaagagggatgtggagacgacaatgtatgtaacagcaaccttaaactagaatataaattttgcacccgagaaggaaatcaagacaaatttwcttatttaccaattcaaaaaggtgtaccagaactagttctaaaagatcagaaggatattgctttagaaataacagtgacaaacagcccttccaacccaaggaatcccacaaaagatggcgatgaygcccatgaggctaaactgattgcaacgtttccagacactttaacctattctgcatatagagaactgagggctttccctgagaaacagttgagttgtgttgccaaccagaatggctcgcaagctgactgtgagctcggaaatccttttaaaagaaattcaaatgtcactttttatttggttttaagtacaactgaagtcacctttgacaccccagatctggatattaatctgaagttagaaacaacaagcaatcaagataatttggctccaattacagctaaagcaaaagtggttattgaactgcttttatcggtctcgggagttgctaaaccttcccaggtgtattttggaggtacagttgttggcgagcaagctatgaaatctgaagatgaagtgggaagtttaatagagtatgaattcagggtaataaacttaggtaaacctcttacaaacctcggcacagcaaccttgaacattcagtggccaaaagaaattagcaatgggaaatggttgctttatttggtgaaagtagaatccaaaggattggaaaaggtaacttgtgagccacaaaaggagataaactccctgaacctaacggagkctcacaactcaagaaagaaacgggaaattactgaaaaacagatagatgataacagaaaattttctttatttgctgaaagaaaataccagactcttaactgtagcgtgaacgtgaactgtgtgaacatcagatgcccsctgcgggggctggacagcaaggcgtctcttattttgcgctcgaggttatggmacagcacatttctagaggaatattccaaactgaactacttggacattctcatgcgagccttcattgatgtgactgctgctgccgaaaatatcaggctgccaaatgcaggcactcaggttcgagtgactgtgtttccctcaaagactgtagctcagtattcgggagtaccttggtggatcatcctagtggctattctcgctgggatcttgatgcttgctttattagtgtttatactatggaagtgtggtttcttcaagagaaataagaaagatcattatgatgccacatatcacaaggctgagatycatgctcagccatctgataaagagaggsttacttcygatgcatagtattgatctacttctgtaattgtgtggattcyttaaacgctctaggtacgatgacagtgttccccgataccatgctgtaaggatccggaaagaagagcgagagatcaaagatgaaaagtatattgataaccttgaaaaaaaacagtggatcacaaagtggaacgaaaatgaaagctactcatagcgggggcctaaaaaaaaaaagcttcacagtacccaaactgctttttccaactcagaaattcaatttggatttaaaagcctgctcaatccctgaggactgatttcagagtgactacacacagtacgaacctacagttttaactgtggatattgttacgtagcctaaggctcctgttttgcacagccaaatttaaaactgttggaatggatttttctttaactgccgtaatttaactttctgggttgcctttrtttttggcgtggctgacttacatcatgtgttggggaagggcctgcccagttgcactcaggtgacatcctccagatagtgtagctgaggaggcacctacactcacctgcactaacagagtggccgtcctaacctcgggcctgctgcgcagacgtccatcacgttagctgtcccacatcacaagactatgccattggggtagttgtgtttcaacggaaagtgctgtcttaaactaaatgtgcaatagaaggtgatgttgccatcctaccgtcttttcctgtttcctagctgtgtgaatacctgctcacgtcaaatgcatacaagtttcattctccctttcactaaaacacacaggtgcaacagacttgaatgctagttatacttatttgtatatggtatttattttttcttttctttacaaaccattttgttattgactaacaggccaaagagtctccagtttacccttcaggttggtttaatcaatcagaattagagcatgggaggtcatcactttgacctaaattatttactgcaaaaagaaaatctttataaatgtaccagagagagttgttttaataacttatctataaactataacctctccttcatgacagcctccaccccacaacccaaaaggtttaagaaatagaattataactgtaaagatgtttatttcaggcattggatattttttactttagaagcctgcataatgtttctggatttcatactgtaacattcaggaattcttggagaaaatgggtttattcactgaactctagtgcggtttactcactgctgcaaatactgtatattcaggacttgaaagaaatggtgaatgcctatggtggatccaaactgatccagtataagactactgaatctgctaccaaaacagttaatcagtgagtcgatgttctattttttgttttgtttcctcccctatctgtattcccaaaaattactttggggctaatttaacaagaactttaaattgtgttttaattgtaaaaatggcagggggtggaattattactctatacattcaacagagactgaatagatatgaaagctgattttttttaattaccatgcttcacaatgttaagttatatggggagcaacagcaaacaggtgctaatttgttttggatatagtataagcagtgtctgtgttttgaaagaatagaacacagtttgtagtgccactgttgttttgggggggcttttttcttttcggaaatcttaaaccttaagatactaaggacgttgttttggttgtactttggaattcttagtcacaaaatatattttgtttacaaaaatttctgtaaaacaggttataacagtgtttaaagtctcagtttcttgcttggggaacttgtgtccctaatgtgtttagattgctagattgctaaggagctgatactttgacagtgtttttagacctgtgttactaaaaaaaagatgaatgtcctgaaaagggtgttgggagggtggttcaacaaagaaacaaagatgttatggtgtttagatttatggttgttaaaaatgtcatctcaagtcaagtcactggtctgtttgcatttgatacatttttgtactaactagcattgtaaaattatttcatgattagaaattacctgtggatatttgtataaaagtgtgaaataaattttttataaaagtgttcattgtttcgtaacacagcattgtatatgtgaagcaaactctaaaattataaatgacaacctgaattatctatttcatcaaaaaaaaaaaaaaaaaaaaaaaaa

SEQ ID NO: 192 - DNA, 695 bp, Homo sapiens
  misc_feature (2): n equals a,t,g, or c
  misc_feature (3): n equals a,t,g, or c
  misc_feature (11): n equals a,t,g, or c
  misc_feature (23): n equals a,t,g, or c
  misc_feature (28): n equals a,t,g, or c
annctatacancatacagggaanggtanactgacagtacggtcggattcccgggtcgacccacgcgtccgctgagccattagaaaatccatttaaaaagatgaaaaacaacattgttgatgctgcaaacaatcacagtgccccagaagtactgtatgggtccttgcttaaccaggaagagctgaaatttagcagaaatgatcttgaatttaaatatcctgctggtcatggctcagccagcgraagtgaacacaggagttgggccagagagagcaaaagctttaatgttctgaaacagctgcttctctcagaaaactgtgtgcgagatttgtccccgcacagaagtaactctgtggctgacagtaaaaagaaaggacacaaaaataatgtgaccaacagcaaacctgaatttagcatttcttctttaaatggactgatgtacagttccactcagcccagcagttgcatggataacaggacattttcatacccaggtgtagtaaaaactcctgtgagtcctactttccctgagcacttgggctgtgcagggtctagaccagaatctgggcttttgaatgggtgttccatgcccagtgagaaaggacccattaagtgggttatcactgatgcggagaagatgagtatgaaaagcctctccagattgaccaaaccaccccatactwtattacatgcttc

SEQ ID NO: 193 - DNA, 3131 bp, Homo sapiens
  misc_feature (4): n equals a,t,g, or c
  misc_feature (5): n equals a,t,g, or c
  misc_feature (10): n equals a,t,g, or c
  misc_feature (26): n equals a,t,g, or c
  misc_feature (3128): n equals a,t,g, or c
gggnncaaangctggagctccaccgnggtgcgtccgctctagaactagtggatcccccgggctgcaggattcggcacgaggccacttcctggggccgccggcggggccgctggctgcactcagcgccggagccgggagctagcggccgccgccatgtcccaccagaccggcatccaagcaagtgaagatgttaaagagatctttgccagagccagaaatggaaagtacagacttctgaaaatatctattgaaaatgagcaacttgtgattggatcatatagtcagccttcagattcctgggataaggattatgattcctttgttttacccctgttggaggacaaacaaccatgctatatattattcaggttagattctcagaatgcccagggatatgaatggatattcattgcatggtctccagatcattctcatgttcgtcaaaaaatgttgtatgcagcaacaagagcaactctgaagaaggaatttggaggtggccacattaaagatgaagtatttggaacagtaaaggaagatgtatcattacatggatataaaaaatacttgctgtcacaatcttcccctgccccactgactgcagctgaggaagaactacgacagattaaaatcaatgaggtacagactgacgtgggtgtggacactaagcatcaaacactacaaggagtagcatttcccatttctcgagaarcctttcaggctttggaaaaattgaataatagacagctcaactatgtgcagttggaaatagatataaaaaatgaaattataattttggccaacacaacaaatacagaactgaaagatttgccaaagaggattcccaaggattcagctcgttaccatttctttctgtataaacattcccatgaaggagactatttagagtccatagtttttatttattcaatgcctggatacacatgcagtataagagagcggatgctgtattctagctgcaagagccgtctgctagaaattgtagaaagacaactacaaatggatgtaattagaaagatcgagatagacaatggggatgagttgactgcagacttcctttatgaagaagtacatcccaagcagcatgcacacaagcaaagttttgcaaaaccaaaaggtcctgcaggaaaaagaggaattcgaagactaattaggggcccagcggaaactgaagctactactgattaaagtcatcacattaaacattgtaatactagttttttaaaagtccagcttttagtacaggagaactgaaatcattccatgttgatataaagtagggaaaaaaattgtactttttggaaaatagcacttttcacttctgtgtgtttttaaaattaatgttatagaagactcatgatttctatttttgagttaaagctagaaaagggttcaacataatgtttaattttgtcacactgttttcatagcgttgattccacacttcaaatacttcttaaaattttatacagttgggccagttctagaaagtctgatgtctcaaagggtaaacttactactttcttgtgggacagaaagaccttaaaatattcatattacttaatgaatatgttaaggaccaggctagagtattttctaagctggaaacttagtgtgccttggaaaaggccgcaagttgcttactccgagtagctgtgctagctctgtcagactgtaggatcatgtctgcaacttttagaaatagtgctttatattgcagcagtcttttatatttgacttttttttaatagcattaaaattgcagatcagctcactctgaaactttaagggtaccagatattttctatactgcaggatttctgatgacattgaaagactttaaacagccttagtaaattatctttctaatgctctgtgaggccaaacatttatgttcagattgaaatttaaattaatatcattcaaaaggaaacaaaaaatgttgagttttaaaaatcaggattgacttttttctccaaaaccatacatttatgggcaaattgtgttctttatcacttccgagcaaatactcagatttaaaattactttaaagtcctggtacttaacaggctaacgtagataaacaccttaataatctcagttaatactgtatttcaaaacacatttaactgttttctaatgctttgcattatcagttacaacctagagagattttgagcctcatatttctttgatacttgaaatagagggagctagaacacttaatgtttaatctgttaaacctgctgcaagagccataactttgaggcattttctaaatgaactgtggggatccaggatttgtaatttcttgatctaaactttatgctgcataaatcacttatcggaaatgcacatttcatagtgtgaagcactcatttctaaaccttattatctaaggtaatatatgcacctttcagaaatttgtgttcgagtaagtaaagcatattagaataattgtgggttgacagatttttaaaatagaatttagagtatttggggttttgtttgtttacaaataatcagactataatatttaaacatgcaaaataactgacaataatgttgcacttgtttactaaagatataagttgttccatgggtgtacacgtagacagacacacatacacccaaattattgcattaagaatcctggagcagaccatagctgaagctgttattttcagtcaggaagactacctgtcatgaaggtataaaataatttagaagtgaatgtttttctgtaccatctatgtgcaattatactctaaattccactacactacattaaagtaaatggacattccagaatatagatgtgattatagtcttaaactaattattattaaaccaatgattgctgaaaatcagtgatgcatttgttatagagtataactcatcgtttacagtatgttttagttggcagtatcatacctagatggtgaataacatattcccagtaaatttatatagcagtgaagaattacatgccttctggtggacattttataagtgcattttatatcacaataaaaattttttctctttaaaaaaaaaaaaaaaaaaaaaaaaaaaaaaaaaaaaaaaaaaaaaaaaaaaaaaaaaaaaanaaa

SEQ ID NO: 194 - DNA, 2058 bp, Homo sapiens
  misc_feature (2045): n equals a,t,g, or c
gccactccgggtttatttgtttacaagcggattacgtcagctcctccctctcttccctatctctggacccgcctcctgaactcttttcccgcccctttcggctccgaaccggcttgcgtcacaatggtgcgatattcggattggctggagtcggccatcacgctccacgtacgccacttccttttcgtggcactataaagggtgctgcacggcgcttgcatctcttcgcctctcggagctggaaatgcagctattgagrtcttcgaatgctgcggagctggaggcggaggcagctggggaggtccgagcgatgtgaccaggccgccatcgctcgtctcttcctctctcctgccgcctcctgtctcgaaaataacttttttagtctaaagaaagaaagacaaaagtagtcgtccgcccctcacgccctctcttcctctcagccttccgcccggtgaggaagcccggggtggytgctccgccgtcggggccgcgccgccgagccccggccgccccgggccgcccccgcacgccgcccccatgcatcccttctacacccgggccgccaccatgataggcgagatcgccgccgccgtgtccttcatctccaagtttctccgcaccaaggggctcacgagcgagcgacagctgcagaccttcagccagagcctgcaggagctgctggcagaacattataaacatcactggttcccagaaaagccatgcaagggatcgggttaccgttgtattcgcatcaaccataaaatggatcctctgattggacaggcagcacagcggattggactgagcagtcaggagctgttcaggcttctcccaagtgaactcacactctgggttgacccctatgaagtgtcctacagaattggagaggatggctccatctgtgtgctgtatgaagcctcaccagcaggaggtagcactcaaaacagcaccaacgtgcaaatggtagacagccgaatcagctgtaaggaggaacttctcttgggcagaacgagcccttccaaaaactacaatatgatgactgtatcaggttaagatatagtctgtggatggatcatctgatgatgatggataaatttgatttttgctttgggtgggctcctcttggggatggattatggaatttaaaccatgtcacagctgtgaagatctggcacaagatagaatggtaaaaaaaaaaaaaaattttaagtgacagtgccatagtttggacagtacctttcaatgattaattttaatagcctgtgagtccaagtaaatgatcactttatttgctagggagggaagtcctagggtggtttcagtttctcccagacatacctaaatttttacatcaatccttttaaagaaaatctgtatttcaaagaatctttctctgcagtaaatctcgcaggggaatttgcactattacacttgaaagttgttattgttaaccttttcggcagcttttaataggaaagttaaacgttttaaacatggtagtactggaaattttacaagacttttacctagcacttaaatatgtataaatgtacataaagacaaactagtaagcatgacctggggaaatggtcagaccttgtattgtgtttttggccttgaaagtagcaagtgaccagaatctgccatggcaacaggctttaaaaaagacccttaaaaagacactgtctcaactgtggtgttagcaccagccagctctctgtacatttgctagcttgtagttttctaagactgagtaaacttcttatttttagaaagtggaggtctggtttgtaactttccttgtacttaattgggtaaaagtcttttccacaaaccaccatctattttgtgaactttgttagtcatcttttatttggtaaattatgaactggtgtaaatttgtacagttcatgtatattgattgtggcaaagttgtacagatttctatattttggatgagaaatttttcttctctctataataaatcgtttcttatcttggcattttaaaaaaaaaaaaaaaaaaaaaaagggcgggcgctctanaagatccaagctt

SEQ ID NO: 195 - DNA, 831 bp, Homo sapiens
  misc_feature (2): n equals a,t,g, or c
  misc_feature (28): n equals a,t,g, or c
  misc_feature (44): n equals a,t,g, or c
  misc_feature (791): n equals a,t,g, or c
  misc_feature (793): n equals a,t,g, or c
  misc_feature (806): n equals a,t,g, or c
anccctcactaagggaacaaaagctggnagctccaccgcggtgncgaccgctctagaactagtggatcccccgggctgcaggaattcggcagagttcgacctctgctgcagcccgtgccgccgccgcctcctgggaagagaggaagcgggagaggagcccacgtcgcctgtcacccaatatctccagccgcgcagtcccgaagagtgtaagatgttcgcctgcgccaagctcgcctgcaccccctctctgatccgagctggatccagagttgcatacagaccaatttctgcatcagtgttatctcgaccagaggctagtaggactggagagggctctacggtatttaatggggcccagaatggtgtgtctcagctaatccaaagggagtttcagaccagtgcaatcagcagagacattgatactgctgccaaatttattggtgcaggtgctgcaacagtaggagtggctggttctggtgctggtattggaacagtctttggcagccttatcattggttatgccagaaacccttcgctgaagcagcagctgttctcatatgctatcctgggatttgccttgtctgaagctatgggtctcttttgtttgatggttgctttcttgattttgtttgccatgtaacaaattactgcttgacatgttggcattcatattaattacggatgtaattctgtgtatcttactgtgactccgaaaactgtagtattggtgtcatgggaatgtacgttatttccaaagtcatttcattaaagatgaaaactttaattcctcngngattggactacanaagttagattaccccaagagacggc

SEQ ID NO: 196 - DNA, 961 bp, Homo sapiens
  misc_feature (31): n equals a,t,g, or c
  misc_feature (32): n equals a,t,g, or c
  misc_feature (923): n equals a,t,g, or c
  misc_feature (947): n equals a,t,g, or c
  misc_feature (953): n equals a,t,g, or c
  misc_feature (954): n equals a,t,g, or c
  misc_feature (960): n equals a,t,g, or c
tagatagaacagatgttttgtgtgaaatttnntatctttaacttaatwaaccagcaggaactgtatgaacacaacacacccaactgacaaacagagagaactaacatgtttatttagctgtatgtatatatgcttaactacacccgaggaagctgtagagttagaaaaacatgaaccattaacagatgtggcctccctgcagaacttttactttgaaaaagaagtacgtctgaaccagattcacatgtttgatatttggatgcagagaaaatggggcagaaagcatcgcaacagttggctctgaaggacagcaaagaggtgcccgtcgtctgtgargtggtcagtgaagctatagtccatgcagctcagaaactgaaggagtaccttggatttgaatatcctccaagtaaactctgcccagctgcaaatactctgaatgagatcttcttaatccatttcatcactttctgccaagaaaagggagttgatgagtggctgaccaccaccaagatgaccaagcaccaagccttcctgtttggtgcagactggatttggaccttttggggatcygacaagcaaataaagcttcagctcgcagtacagactctgcagatgtcttcacctcctcctgtggaatctaagccttgtgacctttccaatccagaatcaarggtaraggartcttcctggaagaaaagtagatttgataagctggaagaattctgtaacttaataggagaggattgcctgggtctgtttatcatctttggtatgccaggaaagcctaaagacatcaggggagttgtcctggacagtgtcaaaagtcagatggtgaggagccatctgccaggagggaaggctgtggctcastttgtcctggaaactgaagattgtgtgttcatcaaagagctgctcaaaattgnctgagtaagaaagacgggctgganagaagnnggcaang

SEQ ID NO: 197 - DNA, 606 bp, Homo sapiens
  misc_feature (488): n equals a,t,g, or c
  misc_feature (500): n equals a,t,g, or c
  misc_feature (603): n equals a,t,g, or c
gcttgggtctgtcccgggtggacgacgccgtggctgccaacacccgccagtgygcccagaggagggacaggagaggcggtgaaggaagagggcaggggatcgagccttcacccgcctctgccaccccagggactcggggagtatgccgcatgccagtcacacgccttcatgaagggcgttttcaccttcgtcacaggcaccggcatggcctttggcttgcagatgttcattcagaggaagtttccataccctttgcagtggagcctcctagtggccgtggttgcaggctctgtggtcagctacggggtgacgagagtggagtcggagaaatgcaacaacctctggctcttcctggagaccgggcagctccccaaagacaggagcacagatcagagaagctaggagagctccagcaggggcacagaggattgggggcaggaggagtctggaacacagccttcatgccccctgaccccaggccgaccctncccacaccctanggtaccccagtcgtatcctctgtccgcatgtgtggccaggcctgacaaacacctgcagatggctgctgcccaacctgggaccttgcccaggaggttggagcanaaa

SEQ ID NO: 198 - DNA, 393 bp, Homo sapiens
  misc_feature (253): n equals a,t,g, or c
  misc_feature (354): n equals a,t,g, or c
cccacgcgtccgcccacgcgtcctggacctcctgtgcaagaacatgaaacacctgtggttcttcctcctgctggtggcagctcccagatgggtcctgtcccaggtgcagctgcaggagtcgggcccaggactggtgaagccttcacagaccctgtccctcacctgcactgtctctggtggctccatcagcagtggtgcttactactggagctggatccgccagcacccagggaagggcctggagtggattggntwcatctattacagtgggascacctactacaayccgtccctcaaragtctagttascatatcastagacacgtctaagaaccasttctccctgaasctganctctgtgackgccgcggacacggmcgtgtattactgtgc

SEQ ID NO: 199 - DNA, 1061 bp, Homo sapiens
  misc_feature (1035): n equals a,t,g, or c
  misc_feature (1056): n equals a,t,g, or c
gccccacgctgaccaccggcgtggagggaaggcctctgagactctgcactgagcaccattttggacttgtgtgtccaggagtcatgtcccccgacgagtaccaytcaggggtcaacaactctgtgtacaccaacgtcctggtccagaacaggtcagacacaagatcccctcacctcaccccacccccgccccagctggagacctgccccggtgcccccactaggcaggcagcagctggaagtgtaggggttgcagcctcccccamctacctccacctccagcctgcgctttgctgctgccctggcccaggacctgggtcttcccatccccagccaktggctggcggtggctgacaagatcaaggtaccctttgacgtkgagcagaacttccacccggagttcgatgggtatgagcctggtgaktggaccccttcaagggytcctcccctgccgtcgagaccctcgagtctgtcctggaacaccttccagtcagcggcacctccctgtaggagaggtggtgaagcaggcagacgtcgtgctcctgggataccmagtccccttctccctgagtcctgatgttcgcaggaaaaatctggagatttacgaggctgtgacgtccccccagggccccgccatgacctggagcatgtttgctgtgggctggatggagctgaaggacgcagtgcgggcccggggcctcctggacaggagctttgccaacatggctgaacccttcaaggtgtggacggagaatgcagacgggtcaggcgctgtgaacttcctgacaggcatggggggcttctgcaggcggtggtcttcgggtgcacggggttcagggtcacccgagcgggtgtgacctttgaccctgtgtgtctgtcggggatctccagartgagcgtytccggcatcttctaccaggggaacaagctcaacttctctttttccgaggactccgtgaccgtggaggtcacagctcgagcagggccctgggctcctcacctggaggctgagctgtggccattccagtcccggmtnttccttgtkcmggammacaangggct

SEQ ID NO: 200 - DNA, 1359 bp, Homo sapiens
  misc_feature (1005): n equals a,t,g, or c
  misc_feature (1128): n equals a,t,g, or c
  misc_feature (1342): n equals a,t,g, or c
  misc_feature (1343): n equals a,t,g, or c
  misc_feature (1344): n equals a,t,g, or c
tcacgcgtccggggctgcagtaggtcccggcaaccgcaggctcgcggcgggcgctgggcgcgggatccgactctagtcgtaatggaggcgggcggctttctggactcgctcatttacggagcatgcgtggtcttcacccttggcatgttctccgccggcctctcggacctcaggcacatgcgaatgacccggagtgtggacaacgtccagttcctgccctttctcaccacggaagtcaacaacctgggctggctgagttatggggctttgaagggagacgggatcctcatcgtcgtcaacacagtgggtgctgcgcttcagaccctgtatatcttggcatatctgcattactgccctcggaagcgtgttgtgctcctacagactgcaaccctgctaggggtccttctcctgggttatggctacttttggctcctggtacccaaccctgaggcccggcttcagcagttgggcctcttctgcagtgtcttcaccatcagcatgtacctctcaccactggctgacttggctaaggtgattcaaactaaatcaacccaatgtctctcctacccactcaccattgctacccttctcacctctgcctcctggtgcctctatgggtttcgactcagagatccctatatcatggtgtccaactttccaggaatcgtcaccagctttatccgcttctggcttttctggaagtacccccaggagcaagacaggaactactggctcctgcaaacctgaggctgctcatctgaccactgggcaccttagtgccaacctgaaccaaagagacctccttgtttcagctgggcctgctgtccagcttcccaggtgcagtgggttgtgggaacaagagatgactttgaggataaaaggaccaaagaaaaagctttacttagatgattgattggggcctaggagatgaaatcactttttattttttagagatttttttttttaattttggaggttggggtgcaatctttagaatatgccttnaaaggccgggcgcggtgctcacgcctgtaatcccagcactttgggaggccaaggtgggcggatcgcctgaggtcaggagttcaagaccaacctgactaacatggtgaaaccccatctctactnaaaatacaaaattagccaggcatgatggcacatgcctgtaatcccagatacttgggaggctgaggcaggagaattgcttgaacccaggaggtggaggttgcagtgagctgagatcgtgccattgtgatatgaatatgccttatatgctgatatgaatatgccttaaaataaagtgttccccacccctgaaaaaaaaaaaaaaaaaaaaaaaaannnaaaaagggcggccgc

SEQ ID NO: 201 - DNA, 726 bp, Homo sapiens
  misc_feature (7): n equals a,t,g, or c
  misc_feature (30): n equals a,t,g, or c
  misc_feature (179): n equals a,t,g, or c
  misc_feature (724): n equals a,t,g, or c
ttcgaanttacccttcattaaagggaacanaagttggagcttccaccgcggtggcggccgctctagaactagtggatcccccgggctgcaggaattcggcacgaggagagaactagtctcgcgcagagcgcagcgmacggccacagacagccctgggcatccaccgacggcgcacggangccagcagagccggaaggcgcgccccgggcagagaaagccgagcagagctgggtggcgtctccgggccgccgctccgacgggccagcgccctccccatgtccctgctcccacgccgcgcccctccggtcagcatgaggctcctggcggccgcgctgctcctgctgctgctggcgctgtacaccgcgcgtgtggacgggtccaaatgcaagtgctcccggaaggacccaagatccgctacagcgacgtgaagaagctggaaatgaagccaaagtacccgcactgcgaggagaagatggttatcatcaccaccaagagcgtgtccaggtaccgaggtcaggagcactgcctgcaccccaagctgcagagcaccaagcgcttcatcaagtggtacaacgcctggaacgagaagcgcagggtctacgaagaatagggtgaaaaacctcagaagggaaaactccaaaccagttgggagacttgtgcaaaggactttgcagattaaaaaaaaaaaaaaaaaaaaaaaaaaagcctttctttctcacaggcnta

SEQ ID NO: 202 - DNA, 2714 bp, Homo sapiens
gctttgtttgccatttcctacaggtgaaacgccatcattaggattcactgtaacgttagtgctattaaactcactagcatttttattaatggccgttatctacactaagctatactgcaacttggaaaaagaggacctctcagaaaactcacaatctagcatgattaagcatgtcgcttggctaatcttcaccaattgcatctttttctgccctgtggcgtttttttcatttgcaccattgatcactgcaatctctatcagccccgaaataatgaagtctgttactctgatattttttccattgcctgcttgcctgaatccagtcctgtatgttttcttcaacccaaagtttaaagaagactggaagttactgaagcgacgtgttaccaagaaaagtggatcagtttcagtttccatcagtagccaaggtggttgtctggaacaggatttctactacgactgtggcatgtactcacatttgcagggcaacctgactgtttgcgactgctgcgaatcgtttcttttaacaaagccagtatcatgcaaacacttgataaaatcacacagctgtcctgcattggcagtggcttcttgccaaagacctgagggctactggtccgactgtggcacacagtssgcccactctgattatgcagatgaagaagattcctttgtctcagacagttctgaccaggtgcaggcctgtggacgagcctgcttctaccagagtagaggattccctttggtgcgctatgcttacaatctaccaagagttaaagactgaactactgtgtgtgtaaccgtttcccccgtcaaccaaaatcagtgtttatagagtgaaccctattctcatctttcatctgggaagcacttctgtaatcactgcctggtgtcacttagaagaaggagaggtggcagtttatttctcaaaccagtcattttcaaagaacaggtgcctaaattataaattggtgaaaaatgcaatgtccaagcaatgtatgatctgtttgaaacaaatatatgacttgaaaaggatcttaggtgtagtagagcaatataatgttagttttttctgatccataagaagcaaatttatacctatttgtgtattaagcacaagataaagaacagctgttaatattttttaaaaatctattttaaaatgtgattttctataactgaagaaaatatcttgctaattttacctaatgtttcatccttaatctcaggacaacttactgcagggccaaaaaagggactgtcccagctagaactgtgagagtatacataggcattactttattatgttttcacttgccatccttgacataagagaactataaattttgtttaagcaatttataaatctaaaacctgaagatgtttttaaaacaatattaacagctgttaggttaaaaaaatagctggacatttgttttcagtcattatacattgctttggtccaatcagtaattttttcttaagtgttttgtgattacactactagaaaaaaagtaaaaggctaattgctgtgtgggtttagtcgatttggctaaactactaactaatgtgggggtttaatagtatctgagggatttggtggcttcatgtaatgttctcattaatgaatacttcctaatatcgttggctctactaatattttccaatttgctgggatgtcacctagcaatagcttggattatatagaaagtaaactgtggtcaatacttgcatttaattagacgaaacggggagtaattatgacacgaagtacttatgtttatttcttagtgagctggattatcttgaacctgtgctattaaatggaaatttccatacatcttccccatactattttttataaaagagcctattcaatagctcagaggttgaactctggttaaacaagataatatgttattaataaaaatagaagaagaaagaataaagcttagtcctgtgtctttaaaaattaaaaattttacttgattcccatctatgggctttagacctattactgggtggagtcttaaagttataattgttcaatatgttttttgaacagtgtgctaaatcaatagcaaacccactgccatattagttattctgaatatactaaaaaaatccagctagattgcagtttaataattaaactgtacatactgtgcatataatgaatttttatcttatgtaaattatttttagaacacaagttgggaaatgtggcttctgttcatttcgtttaattaaagctacctcctaaactatagtggctgccagtagcagactgttaaattgtggtttatatactttttgcattgtaaatagtctttgttgtacattgtcagtgtaataaaaacagaatctttgtatatcaaaatcatgtagtttgtataaaatgtgggaaggatttatttacagtgtgttgtaattttgtaaggccaactatttacaagttttaaaaattgctatcatgtatatttacacatctgataaatattaaatcataacttggtaagaaactcctaattaaaaggttttttccaaaattcaggttattgaaaayttttcattttattcatttaaaaactagaataacagatatataaaagtgttaatctttgtgctatatggtatgaaatacaatattgtactcagtgttttgaattattaaagtttctagaaagcaaaaaaaaaaaaaaaaaaactcgtag

SEQ ID NO: 203 - DNA, 422 bp, Homo sapiens
  misc_feature (419): n equals a,t,g, or c
gacggagccggaagcaggaagcagcctgtkctccccaggacctgcctggttgggggaattggaggcttctaggaggtggcacggtgcacgccaagatggctgtgtccacagaggagctggaggccacggttcaggaagtcctggggagactgaagagccaccagtttttccagtccacatgggacactgttgccttcattgttttcctcaccttcatgggcaccgtgctgctcctgctgctgctggtcgtcgcccactgctgctgctgcagctcccccgggccccgcagggaaagccccaggaaggaaagacccaagggagtggataacttggccctggaaccctgaccctgtgtctcctgcccggtggcagtaacaaagccttctgtctgcccagaaaaaaaaaaaaaaaaaaaaaanggg

SEQ ID NO: 204 - DNA, 2339 bp, Homo sapiens
  misc_feature (2): n equals a,t,g, or c
  misc_feature (18): n equals a,t,g, or c
  misc_feature (19): n equals a,t,g, or c
  misc_feature (47): n equals a,t,g, or c
  misc_feature (91): n equals a,t,g, or c
  misc_feature (125): n equals a,t,g, or c
  misc_feature (199): n equals a,t,g, or c
  misc_feature (2238): n equals a,t,g, or c
  misc_feature (2321): n equals a,t,g, or c
  misc_feature (2329): n equals a,t,g, or c
  misc_feature (2334): n equals a,t,g, or c
anacatggccaatcaatnntctttcagcgtcaagaatacgggacatncaccaggaccctgtgaactgaccgctgtgcctgcccttcaagtncaaggccaaggattgcactgtgcccatcaacacntgcatccagaacccctgtcagcatgaggcacctgccacctgagtgacagccccaaggatgggttcagctgytcntgccctctgggctttraggggcagcggtgtgagatcaacccagatgactgtgaggacaacgactgcgaaamcaatgccacctgcgtggacgggatcaacaactacgtgtgtatctgtccgcctaactacacaggtgagctatgcgacgaggtgattgaccactgtgtgcctgagctgaacctctgtcagcatgaggccaagtgcatccccctggacaaaggattcagctgcgagtgtgtccctggctacagcgggaagctctgtgagacagacaatgatgactgtgtggcccacaagtgccgccacggggcccagtgcgtggacacaatcaatggctacacatgcacctgcccccagggcttcagtggacccttctgtgaacaccccccacccatggtcctactgcagaccagcccatgcgaccagtacgagtgccagaacggggcccagtgcatcgtggtgcagcaggagcccacctgccgctgcccaccaggcttcgccggccccagatgcgagaagctcatcactgtcaacttcgtgggcaaagactcmtacgtggaactggcctccgccaaggtccgaccccaggccaacatctccctgyaggtggccctgacaaggacaacggmatccttctctacaaaggagacaatgaccccctggcactggagctgtaccagggccacgtgcggctggtctatgacagcctgagttcccctccaaccacagtgtacagtgtggagacagtgaatratgggcagtttcacagtgtggagctggtgacgctaaaccagaccctgaacctagtagtggacaaaggaactccaaagagcctggggaagctccagaagcagccagcagtgggcatcaacagccccctctaccttggaggcatccccacctccaccggcctctccgccttgcgccagggcacggaccggcctctaggcggcttccacggatgcatccatgaggtgcgcatcaacaacgagctgcaggacttcaaggccctcccaccacagtccctgggggtgtcaccaggctgcaagtcctgcaccgtgtgcaagcacggcctgtgccgctccgtggagaaggacagcgtggtgtgcgagtgccgcccaggctggaccggcccactctgcgatcaggaggcccgggacccctgcctcggccacagatgccaccatggaaaatgtgtggcaactgggacctcatacatgtgcaagtgtgccgagggctatggaggggacttgtgtgacaacaagaatgactctgccaatgcctgctcagccttcaagtgtcaccatgggcagtgccacatctcagaccaaggggagccctactgcctgtgccagcccggctttagcggcgagcactgccaacaagagaatccgtgcctgggacaagtagtccgagaggtgatccgccgccagaaaggttatgcatcatgtgccacagcctccaaggtgcccatcatggaatgtcgtgggggctgtgggccccagtgctgccagcccacccgcagcaagcggcggaaatacgtcttccagtgcacggacggctcctcgtttgtagaagaggtggagagacacttagagtgcggctgcctcgcgtgttcctaagcccctgcccgcctgcctgccacctctcggactccagcttgatggagttgggacagccatgtgggaccccctggtgattcagcatgaaggaaatgaagctggagaggaaggtaaagaagaagagaatattaagtatattgtaaaataaacaaaaaatagaacttatttttattatggaaagtgactattttcatcttttattatataaatatattacaccatctgcgtatatgtaccatatagtgagttatttttaccaagttttgtgttgtgtatttgttgtgtttttaaaaatagctgtttaaaaatttaagaaaaaaatagactaataaaaatgctttaaaacaaaaggataagaataaagaatgatagcctgtctgaggaaggaggaagatgttttcatgtttatgaaacggnattatgtcggcagtagaccaagagctgctcatgagatcagaaaaaggaataagaggaagagagaggagggaaaagaccttgtntctgtttnttaantccct

SEQ ID NO: 205 - DNA, 1655 bp, Homo sapiens
  misc_feature (1548): n equals a,t,g, or c
  misc_feature (1559): n equals a,t,g, or c
  misc_feature (1564): n equals a,t,g, or c
  misc_feature (1623): n equals a,t,g, or c
  misc_feature (1643): n equals a,t,g, or c
ttcggggctagcgtcggcgaggcttgagcttgcagcgcgcggcttccctgctttctcgcggccaccccggctccggcggcctcggcgcgcgaggggctggaggtgcgggagccgctctccgccggtcggtccccgcgcggctgagcccaggccgccagcgccgcggccmcgtgcggtgtccctgagctcctgctccccgccgggctgctccgagcaacggtgcttcggagctccaaactcgggctgccggggcaagtgtcttcatgaacccagaggatgtccgggaagcactacaagggtcctgaagtcagttgttgcatcaaatacttcatatttggcttcaatgtcatattttggtttttgggaataacatttcttggaattggactgtgggcatggaatgaaaaaggagttctgtccaacatctcttccatcaccgatctcggcggctttgacccagtttggctcttccttgtggtgggaggagtgatgttcattttgggatttgcagggtgcattggagcgctacgggaaaacactttccttctcaagtttttttctgtgttcctgggaattattttcttcctggagctcactgccggagttctagcatttgttttcaaagactggatcaaagaccagctgtatttctttataaacaacaacatcagagcatatcgggatgacattgatttgcaaaacctcatagacttcacccaggaatattggcagtgctgtggggcttttggagctgatgattggaacctaaatatttacttcaattgcacagattccaatgcaagtcgagagcgatgtggcgttccattctcctgctgcactaaagatcccgcagaagatgtcatcaacactcagtgtggctatgatgccaggcaaaaaccagaagttgaccagcagattgtaatctacacgaaaggctgtgtgccccagtttgagaagtggttgcaggacaatttaaccatcgttgctggtattttcataggcattgcattgctgcagatatttgggatatgcctggcccagaatttggttagcgatatcgaagctgtcagggcgagctggtagaccccctgcaaccgctgctgcaagacactggacagacccagctttcgggaccctcccgcgtgccgaactgatcttcgagctgcatggacctaatcacagatgcagcctgcagtctcgcctaatggagctgccattaggggagtgtaaaactgggaaatgctgctcactgacagaattaaaaaaaaaaataaccagtatgaaagtcgttgcgccgtgaatctctactgtagccatgaatttatggacagttagatgcttaccaaaaaagaaaaaaagggagggtaggggacccagatgtacttgaatgtgcagaaaatacattcttgtcctcatcttccgtaattggagggctgggagargcagctttgctcttcaccacaccttggacggaccaccttctttctgttccatggcctgaaggagtggcatctcctcaaaggactcagcccctcacctgggagggancgagtttctgnccccncttagatttttaatccagcttggtggtccacccgtttgttctgcccccccctggggagncaagattatcaagccttgcncgcacttcttgt

SEQ ID NO: 206 - DNA, 5145 bp, Homo sapiens
  misc_feature (4): n equals a,t,g, or c
  misc_feature (17): n equals a,t,g, or c
  misc_feature (5126): n equals a,t,g, or c
  misc_feature (5143): n equals a,t,g, or c
gtcngattcgcggccgnatcggaggtttcggctaagttggaggtactggccacgactgcatgcccgcgcccgccaggtgatacctccgccggtgacccaggggctctgcgacacaaggagtctgcatgtctaagtgctagacatgctcagctttgtggatacgcggactttgttgctgcttgcagtaaccttatgcctagcaacatgccaatctttacaagaggaaactgtaagaaagggcccagccggagatagaggaccacgtggagaaaggggtccaccaggccccccaggcagagatggtgaagatggtcccacaggccctcctggtccacctggtcctcctggcccccctggtctcggtgggaactttgctgctcagtatgatggaaaaggagttggacttggccctggaccaatgggcttaatgggacctagaggcccacctggtgcagctggagccccaggccctcaaggtttccaaggacctgctggtgagcctggtgaacctggtcaaactggtcctgcaggtgctcgtggtccagctggccctcctggcaaggctggtgaagatggtcaccctggaaaacccggacgacctggtgagagaggagttgttggaccacagggtgctcgtggtttccctggaactcctggacttcctggcttcaaaggcattaggggacacaatggtctggatggattgaagggacagcccggtgctcctggtgtgaagggtgaacctggtgcccctggtgaaaatggaactccaggtcaaacaggagcccgtgggcttcctggtgagagaggacgtgttggtgcccctggcccagctggtgcccgtggcagtgatggaagtgtgggtcccgtgggtcctgctggtcccattgggtctgctggccctccaggcttcccaggtgcccctggccccaagggtgaaattggarctgttggtaacgctggtcctgctggtcccgccggtccccgtggtgaagtgggtcttccaggcctctccggccccgttggacctcctggtaatcctggagcaaacggccttactggtgccaagggtgctgctggccttcccggcgttgctggggctcccggcctccctggaccccgcggtattcctggccctgttggtgctgccggtgctactggtgccagaggacttgttggtgagcctggtccagctggctccaaaggagagagcggtaacaagggtgagcccggctctgctgggccccaaggtcctcctggtcccagtggtgaagaaggaaagagaggccctaatggggaagctggatctgccggccctccaggacctcctgggctgagaggtagtcctggttctcgtggtcttcctggagctgatggcagagctggcgtcatgggccctcctggtagtcgtggtgcaagtggccctgctggagtccgaggacctaatggagatgctggtcgccctggggagcctggtctcatgggacccagaggtcttcctggttcccctggaaatatcggccccgctggaaaagaaggtcctgtcggcctccctggcatcgacggcaggcctggcccaattggcccmgctggagcaagaggagagcctggcaacattggattccctggacccaaaggccccactggtgatcctggcaaaaacggtgataaaggtcatgctggtcttgctggtgctcggggtgctccaggtcctgatggaaacaatggtgctcagggacctcctggaccacagggtgttcaaggtggaaaaggtgaacagggtcccgctggtcctccaggcttccagggtctgcctggcccctcaggtcccgctggtgaagttggcaaaccaggagaaaggggtctccatggtgagtttggtctccctggtcctgctggtccaagaggggaacgcggtcccccaggtgagagtggtgctgccggtcctactggtcctattggaagccgaggtccttctggacccccagggcctgatggaaacaagggtgaacctggtgtggttggtgctgtgggcactgctggtccatctggtcctagtggactcccaggagagaggggtgctgctggcatacctggaggcaagggagaaaagggtgaacctggtctcagaggtgaaattggtaaccctggcagagatggtgctcgtggtgctcctggtgctgtaggtgcccctggtcctgctggagccacaggtgaccggggcgaactggggctgctggtcctgctggtcctgctggtcctcggggaagccctggtgaacgtggtgaggtcggtcctgctggccccaatggatttgctggtcctgctggtgctgctggtcaacctggtgctaaaggagaaagaggagccaaagggcctaagggtgaaaacggtgttgttggtcccacaggccccgttggagctgctggcccagctggtccaaatggtccccccggtcctgctggaagtcgtggtgatggaggcccccctggtatgactggtttccctggtgctgctggacggactggtcccccaggaccctctggtatttctggccctcctggtccccctggtcctgctgggaaagaagggcttcgtggtcctcgtggtgaccaaggtccagttggccgaactggagaagtaggtgcagttggtccccctggcttcgctggtgagaagggtccctctggagaggctggtactgctggacctcctggcactccaggtcctcagggtcttcttggtgctcctggtattctgggtctccctggctcgagaggtgaacgtggtctaccaggtgttgctggtgctgtgggtgaacctggtcctcttggcattgccggccctcctggggcccgtggtcctcctggtgctgtgggtagtcctggagtcaacggtgctcctggtgaagctggtcgtgatggcaaccctgggaacgatggtcccccaggtcgcgatggtcaacccggacacaagggagagcgcggttaccctggcaatattggtcccgttggtgctgcaggtgcacctggtcctcatggccccgtgggtcctgctggcaaacatggaaaccgtggtgaaactggtccttctggtcctgttggtcctgctggtgctgttggcccaagaggtcctagtggcccacaaggcattcgtggcgataagggagagcccggtgaaaaggggcccagaggtcttcctggcttaaagggacacaatggattgcaaggtctgcctggtatcgctggtcaccatggtgatcaaggtgctcctggctccgtgggtcctgctggtcctaggggccctgctggtccttctggccctgctggaaaagatggtcgcactggacatcctggtacagttggacctgctggcattcgaggccctcagggtcaccaaggccctgctggcccccctggtccccctggccctcctggacctccaggtgtaagcggtggtggttatgactttggttacgatggagacttctacagggctgaccagcctcgctcagcaccttctctcagacccaaggactatgaagttgatgctactctgaagtctctcaacaaccagattgagacccttcttactcctgaaggctctagaaagaacccagctcgcacatgccgtgacttgagactcagccacccagagtggagcagtggttactactggattgaccctaaccaaggatgcactatggatgctatcaaagtatactgtgatttctctactggcgaaacctgtatccgggcccaacctgaaaacatcccagccaagaactggtataggagctccaaggacaagaaacacgtctggctaggagaaactatcaatgctggcagccagtttgaatataatgtagaaggagtgacttccaaggaaatggctacccaacttgccttcatgcgcctgctggccaactatgcctctcagaacatcacctaccactgcaagaacagcattgcatacatggatgaggagactggcaacctgaaaaaggctgtcattctacagggctctaatgatgttgaacttgttgctgagggcaacagcaggttcacttacactgttcttgtagatggctgctctaaaaagacaaatgaatggggaaagacaatcattgaatacaaaacaaataagccatcacgcctgcccttccttgatattgcacctttggacatcggtggtgctgaccaggaattctttgtggacattggcccagtctgtttcaaataaatgaactcaatctaaattaaaaaagaaagaaatttgaaaaaactttctctttgccatttcttcttcttcttttttaactgaaagctgaatccttccatttcttctgcacatctacttgcttaaattgtgggcaaaagagaaaaagaaggattgatcagagcattgtgcaatacagtttcattaactccttcccccgctcccccaaaaatttgaatttttttttcaacactcttacacctgttatggaaaatgtcaacctttgtaagaaaaccaaaataaaaattgaaaaataaaaaccataaacatttgcaccacttgtggcttttgaatatcttccacagagggaagtttaaaacccaaacttccaaaggtttaaactacctcaaaacactttcccatgagtgtgatccacattgttaggtgctgacctagacagagatgaactgaggtccttgttttgttttgttcataatacaaaggtgctaattaatagtatttcagatacttgaagaatgttgatggtgctagaagaatttgagaagaaatactcctgtattgagttgtatcgtgtggtgtattttttaaaaaatttgatttagcattcatattttccatcttattcccaattaaaagtatgcagattatttgcccaaatcttcttcagattcagcatttgttctttgccagtctcattttcatcttcttccatggttccacagaagctttgtttcttgggcaagcagaaaaattaaattgtacctattttgtatatgtgagatgtttaaataaattgtgaaaaaaatgaaataaagcatgtttggttttccaaaagaaaaaaaaaaaaaaaaaacycgrgggggggcccggwacccaattggccccanggggggccgtttacatnca

SEQ ID NO: 207 - DNA, 487 bp, Homo sapiens
  misc_feature (470): n equals a,t,g, or c
  misc_feature (483): n equals a,t,g, or c
tccgccctcccgtcgctcccctgctcggggtcagctagtgtcckctctgctcggccgcgggctcccggaggactgcaggcaggatgacgcaaaacacggtgattgtgaatggagttgctatggcctctaggccatcccagcccacccacgtcaacgtccacatccaccaggagtcagctttgacacaactgctgaaagctggaggttctctgaagaagtttctttttcaccctggggacactgtgccttccacagccaggattggttatgagcagctggctctaggggtgactcagatattgctgggggttgtgagttgtgttcttggagtgtgtctcagcttggggccctggactgtgctgagtgcctcagctgtgccttctgggcggggtctgtggtgatcgcarcargastkgggccattgtccatgaraarcacccgggcaaactkgytggctatattscagccgntcacccggcaagntttg

SEQ ID NO: 208 - DNA, 2296 bp, Homo sapiens
  misc_feature (202): n equals a,t,g, or c
  misc_feature (252): n equals a,t,g, or c
  misc_feature (2258): n equals a,t,g, or c
  misc_feature (2285): n equals a,t,g, or c
gaagaattaggcttggtttcaggttacataaataatagagcagatggttgcctttgggtcttgaaccaaaataagacttactaaaggaagagtgagtttttagaagagaactttacgagcgtgacattatgcattactccacatccaccctttaagaattgatttattacaaaattatgttctattttaaagtccactcccncaaaatactgatttcttccatggattatttttatatgatttgtacaaatnttttctgaaatttaaattgacaagcaatgttataaaaatattgctaatcttctgcttatttttcagcctttaaagtctgaaatactataaaacactgagagtatctatgtctttctgaatttaaaatgaaaattcatgtccatatggagacttacatattccccaatctttccatgaattgcatttttttctaatacttatctctgttaagactccattgaaagttaaacaaaaagccgatataatagtttgggttttttttttttgcttattttagtattttgaatcagagaatacttggccaagctcgtatttgtaaactaaaaccccttgttatttgtatcttctgcatttcagttttactgtaagaacatacatyttgaaattatgaacatttttttcataaaaattaaatgctttaagaaatggagaaggaaaaatagcttttatcaatttttttctcctcaagattctgtaataaacctcaaagtctggtgtagaatggtattttcccgtttgaggtcttggtagttttttttttttttttaaacatggtgccacttttaattaactaaatgttacaaaattctcagcatttgtttttgtctggtagtattattgagtcttttcatacacttcttaaaatgtgaaaatctatgttttcagtattatgacagtatctgcagatactataataatatgctttggccaaatttgctktttatagagtgaaccaagatgtcagttttgtattggggatatgttttacataaatagaactcatttaaaagtatggttcaagtactgctcttctttttatggggaaattgatttttaaggagcgattcttttcctatataaaagctattgaggcttagctttattcatacatgagtgatttggttataactcaatcaaaatttttatctttaaatctgagacaagtattatatttaaaactagatctattaatacattcatcactgcctgaaaatttgctgttctaatgwttgtgaattttcactcattacctagagtaaacttattgcatattttcataatcagtcaaaataataaaactaaaaacaaaaagtaaaaattagttcccaagtaaatatatcagtgtttcctgtgtttgggcagaagtgcaaagtagttttaatttctcacgttgtagaaaaagaggccaaaaaggtcaccttagtttatttttccaaaacataactttaggtattctaatgtattttgttagttgcttagaaatggaaataaaatatatgtgcttattaaataatgcacagtacactagattatagagtttatttttgcttttatgctttaaagaatgcatgcccaaaacactactaccaacaagaggattttttaaaatcacagaattgatatttatctcaagactatcttaagctaatgtacttctgttacataattaaactatttctgctattatttttaaagcagtattattttataaccaattctaaaattcagctttaaaaatattgracataccttcctaccacttacgcttcaagtttcatttattgaataccagggtcatatcttagaattgtatataaaacaacatgtaacccattcatgaaaaacgtttttaagtattgctttttgctgctatgttctgcattgagcctagttttgccattgtcccctgaatgtagtattatctatagattatacataactacatctattgcttttggtggtaaatcaagatttagttgtaattttccagctgtgaaaatgttgccttgtatttaaaagggtttcatgaatggaaacctaagtaaaactaagctcattagtgacagacttgttttcttcttgttattcctccagcaactccctcaccaccacgcctccctgcctaccatccccggaagggtgcttattctttaacaaagagaatctaaaaaaaaaacaaaaaactgttgtctatattcacgtaatgtcctggctttattccctgngtttagagagcattcctggttgtacantgactttgatg

SEQ ID NO: 209 - DNA, 625 bp, Homo sapiens
  misc_feature (1): n equals a,t,g, or c
  misc_feature (10): n equals a,t,g, or c
  misc_feature (25): n equals a,t,g, or c
  misc_feature (26): n equals a,t,g, or c
  misc_feature (600): n equals a,t,g, or c
ntctcattcnacacccaaccttcannttcaactacaacttctccgctttgggcaaacaccgtcactcttgctggaggcaagcttcattccaaagggttgaaatacttccatcactttaccctcagtctctgtggaaaccagggtaggaaaatgtctgtgtgcaccgacaatgtcactgacctccggattcctgagggtgagtcagggttctccaaatctatcacagcctacgtctgccaggcagtcatcatccccccagaggtgacaggctacaaggccggggtttcctcacagcctgtcagccttgctgatcgacttattggggtgacaacagatatgactctggatggaatcacctccccagctgaacttttccacctggagtccttgggaataccggacgtgatcttcttttataggtccaatgatgtgacccagtcctgcagttctgggagatcaaccaccatccgcgtcaggtgcagtccacagaaaactgtccctggaagtttgctgctgccaggaacgtgctcagatgggamctgtgatggctgcaacttccacttcctgtgggaaaamgsgstgsttgcccgctctgctcantggctgactaccatgctatcgtcac

SEQ ID NO: 210 - DNA, 1551 bp, Homo sapiens
  misc_feature (760): n equals a,t,g, or c
  misc_feature (1543): n equals a,t,g, or c
  misc_feature (1544): n equals a,t,g, or c
  misc_feature (1545): n equals a,t,g, or c
  misc_feature (1546): n equals a,t,g, or c
ttaaggctgtccgctctgggctccgcggcctcggcccgctgcactccacctccgccccctcggactccctcccctctgcttctactcctcctgctccagtgcggatcgtttcgcaactgcttgccactcgtcccgtgcctggctgttttyccatttcccggccccctcttcttgagtactttaccccctgcatttggggacagggactggaaaaggggcgggtggagcgtccagtggagaagaaggaagcgaggcccgcagaggaggaggatcggcggactgtggggaggagaccccacgccaccctttctggtcatctcccctcccgccccgcccctgcgcacactccctcgcgggcgagctactttcggaccaggaaagtaagagcggccctgggtgacagcgccgcggggccagtcccggggttagccgcgcgtctgctcgcttctggtccgtcgcgctcccagccagggcacagcggaccgaggatggcttcgaccacaacctgcaccaggttcacggacgagtatcagcttttcgaggagcttggaaagggggcattctcagtggtgagaagatgtatgaaaattcctactggacaagaatatgctgccaaaattatcaacaccaaaaagctttctgctagggatcatcagaaactagaaagagaagctagaatctgccgtcttttgaagcaccctaatattgtgcgacttcatgatagcatatcagaagagggctttcactactttggtggttngattaagttactggaggtgaactgtttgaagacatagtggcaagagaatactacagtgaagctgatgccagtcattgcattcagcagatcctggaggctgtgctacactgccatcagatgggcgtggtccatcgggacctgaagcctgagaatttgcttttagctagcaaatccaagggagcagctgtgaaattggcagactttggcttagccatagaagttcaaggggaccagcaggcgtggtttggttttgctggcacacctggatatctttctycaraagttttacgtaaagatccttatggaaagccagtggatatgtgggcatgtggtgtcattctctatattctacttgtggggtatccacccttctgggatgaagaccaacacagactctatcagcagatcaaggctggagcttatgattttccatcaccagaatgggacacggtgactcctgaagccaaagacctcatcaataaaatgcttactatcaaccctgccaaacgcatcacagcctcagaggcactgaagcacccatggatctgtcaacgttctactgttgcttccatgatgcacagacaggagactgtagactgcttgaagaaatttaatgctagaagaaaactaaagggtgccatcttgacaactatgctggctacaaggaatttctcagcagccaagagtttgttgaagaaaccagatggagtaaaggagtcaactgagagttcaaatacaacaattgaggatgaattcagcttggacttaaccaggttgactcannnnggggg

SEQ ID NO: 211 - DNA, 1011 bp, Homo sapiens
  misc_feature (309): n equals a,t,g, or c
  misc_feature (801): n equals a,t,g, or c
tcgacccacgcgtccgggagaatggcggcggaaggctggatttggcgttggggctggggccggcggtgcctgggaaggcctgggcttctcggccccggccctggccccactacacctctctttcttcttttgttgttggggtctgtgactgcggatataactgacggcaacagtgaacatctcaagcgggagcattcgctcattaagccctaccaaggggtcggttccagctctatgcccctctgggacttccagggcagcactatgctcacgagccagtacgtacgtctgacccctgacgagcgcagnaaagagggctctatctggaaccaccagccgtgcttcctcaaagactgggaaatgcacgtccacttcaaagtccacggcacagggaagaagaacctccatggagacggcatcgccttgtggtacacccgggaccgcctcgtgccagggcctgtgtttggaagcaaagataacttccacggcttagccatcttcctggacacctaccccaatgatgagaccactgagcgcgtgttcccgtacatctcggtgatggtgaacaatggctccctgtcctacgaccacagcaaggatgggcgctggaccgagctggcgggctgcacggctgacttccgcaaccgcgatcacgacaccttcctggctgtgcgctactcccggggccgtctgacggtgatgaccgacctggaggacaagaacgagtggaagaactgcattgacatcacgggagtgcgcctgcccaccggctactacttcggggcctccgccggcaccggnracctgtctgacaatcatgacatcatctccatgaaagctgttccaagctgatggtggaagcacacgcccgacgaggagaagcatcgacttggaccaagatcgagcccagcgtcaacttctcaagtcgcccaaagacaacgtggacgaccccacggggaactttcgcagcgggcccctgamggggtggcgggtgtttcctgctgctgctgt

SEQ ID NO: 212 - DNA, 1639 bp, Homo sapiens
  misc_feature (1630): n equals a,t,g, or c
  misc_feature (1637): n equals a,t,g, or c
ggcacgaggacgcgccgaggtactaggcagagccgtggaaccgccgccaggtcgctgttggtccacgccgcccgtcgcgccgcccgcccgctcagcgtccgccgccgccatgggagtgcaggtggaaaccatctccccaggagacgggcgcaccttccccaagcgcggccagacctgcgtggtgcactacaccgggatgcttgaagatggaaagaaatttgattcctcccgggacagaaacaagccctttaagtttatgctaggcaagcaggaggtgatccgaggctgggaagaaggggttgcccagatgagtgtgggtcagagagccaaactgactatatctccagattatgcctatggtgccactgggcacccaggcatcatcccaccacatgccactctcgtcttcgatgtggagcttctaaaactggaatgacaggaatggcctcctcccttagctccctgttcttggatctgccrtggagggatctggtgcctccagacatgtgcacatgartccatatggagcttttcctgatgttccactccactttgtatagacatctgccctgactgaatgtgttctgtcactcagctttgcttccgacacctctgtttcctcttcccctttctcctcgtatgtgtgtttacctaaactatatgccataaacctcaagttaytcattttattttgttttcattttggggtgaagattcagtttcagtcttttggatataggtttccaattaagtacatggtcaagtattaacagcacaagtggtaggttaacattagaataggaattggtgttgggggggggtttgcaagaatattttattttaattttttggatgaaatttttatctattatatattaaacattcttgctgctgcgctgcaaagccatagcagatttgaggcgctgttgaggactgaattactctccaagttgagagatgtctttgggttaaattaaaagccctacctaaaactgaggtggggatggggagagcctttgcctccaccattcccacccaccctccccttaaaccctctgcctttgaaagtagatcatgttcactgcaatgctggacactacaggtatctgtccctgggccagcagggacctctgaagccttctttgtggccttttttttttttcatcctgtggtttttctaatggactttcaggaattttgtaatctcataactttccaagctccaccacttcctaaatcttaagaactttaattgacagtttcaattgaaggtgctgtttgtagacttaacacccagtgaaagcccagccatcatgacaaatccttgaatgttctcttaagaaaatgatgctggtcatcgcagcttcagcatctcctgttttttgatgcttggctccctctgctgatctcagtttcctggcttttcctccctcagccccttctcacccctttgctgtcctgtgtagtgatttggtgagaaatcgttgctgcacccttcccccagcaccatttatgagtctcaagttttattattgcaataaaagtgctttatgccggcttttctcaaaaaaaaaaaaaaaaaaaaaaaaaaaaaaaaaaaaaaaaaaaaaaaaaaaaaaaaaaaaaaaanggggggncc

SEQ ID NO: 213 - DNA, 2127 bp, Homo sapiens
ttgaggttctgggggtcctggagacttaccattgagccatgcaatctgggaagcacaggaataagtagacactttgaaaatggatttgaatgttctcatcccttttgcagcttttctttttggctctctcatgtccttggcttgctcctctattctacctctctttctccagcaataatatgcaaatgaagacatgtatccataagaaggagtgctcttcatcaactaatagagcacctaccacagtgtcatacctggtagaggtgagcaattcatattcaaaggttgcaaagtgtttgtaatatattcatgaggctggaakkaagaagaattaaaaatttgtcctaattacaatgagaaccattctaggtagtgatcttggagcacacatgaataactttctgaaggtgcaaccaaatccatttttatttctgcctggcttggtcacctctgtaaaggtttaacttagtgttgtcaagtaacagttactgaaagagctgagaaaaagaacaatgaacagcaacgatcttgactgtgcaactcagacattcctgcagaaaagacatatgttgctttacaagaaggccaaagaactatggggccttcccagcatttgactgttcattgcatagaatgaattaaatatccagttacttgaatgggtataacgcatgaatatttgtgtgtctgtgtgtgtgtctgagttgtgtgattttattaggggcatctgccaattctctcactgtggttccttctctgactttgcctgttcatcatctaaggaggctagatccttcgctgacttcaccattcctcaaacctgtaagtttctcacttcttccaaattggctttggctctttcttcaacctttccattcaagagcaatctttgctaaggagtaagtgaatgtgaagagtaccaactacaacaattctacagataattagtggattgtgttgtttgttgagagtgaaggtttcttggcatctggtgcctgattaaggcttgagtattaagttctcagcatatctctctattgtcttgacttgagtttgctgcattttctatgtgctgttcgtgacttggagaacttaaagtaatcgagctatgccaacttggggtggtaacagagtacttcccaccacagtgttgaaagggagagcaaagtcttatggataaaccctcctttcttttggggacacatggctctcacttgagaagctcacctgtgctgaatgtccacatggtcactaaacatgttatccttaaaccccccgtatgcctgagttgaaagggctctctcttattaggttttcatgggaacatgaggcagcaaatctattgctaagactttaccaggctcaaatcatctgaggctgatagatatttgacttggtaagacttaagtaaggctctggctcccaggggcataascaacagtttcttgaatgtgccatctgaraagggagacccaggttatgagttttcctttgaacacattggtcttttctcaaagttcctgccttgctagactgttagctctttgaggacagggactatgtcttatcaatcactattattttcctgttacctagcatgggacaagtacacaacacatatttgttcaatgaatgaatgaatgtcttctaaaagactcctctgattgggagaccatatctataattgggatgtgaatcatttcttcagtggaataagagcacaacggcacaaccttcaaggacatattatctactatgaacattttactgtgagactctttattttgccttctacttgcgctgaaatgaaaccaaaacaggccgttgggttccacaagtcaatatatgttggatgaggattctgttgccttattgggaactgtgagacttatctggtatgagaagccagtaataaacctttgacctgttttaaccaatgaagattatgaatatgttaatatgatgtaaattgctatttaagtgtaaagcagttctaagttttagtatttgggggattggtttttattatttttttcctttttgaaaaatactgagggatcttttgataaagttagtaatgcatgttagattttagttttgcagagcatgttgtttaacaaataaagg

SEQ ID NO: 214 - DNA, 1166 bp, Homo sapiens
  misc_feature (1163): n equals a,t,g, or c
gcggacgcgtgggcggacgcgtgggcggacgcgtgggcgggtcgcttggtggctccgtctgtctgtccgtccgcccgcgggtgccatcatggcggacgcggccagtcaggtgctcctgggctccggtctcaccatcctgtcccagccgctcatgtacgtgaaagtgctcatccaggtgggatatgagcctcttcctccaacaataggacgaaatatttttgggcggcaagtgtgtcagcttcctggtctctttagttatgctcagcacattgccagtatcgatgggaggcgcgggttgttcacaggcttaactccaagactgtgttcgggagtccttggaactgtggtccatggtaaagttttacagcattaccaggagagtgacaagggtgaggagttaggacctggaaatgtacagaaagaagtctcatcttcctttgaccacgttatcaaggagacaactcgagagatgatcgctcgttctgctgctaccctcatcacacatcccttccatgtgatcactctgagatctatggtacagttcattggcagagaatccaagtactgtggactttgtgattccataataaccatctatcgggaagagggcattctaggatttttcgcgggtcttgttcctcgccttctaggtgacatcctttctttgtggctgtgtaactcactggcctacctcgtcaatacctatgcactggacagtggggtttctaccatgaatgaaatgaagagttattctcaagctgtcacaggattttttgcgagtatgttgacctatccctttgtgcttgtctccaatcttatggctgtcaacaactgtggtcttgctggtggatgccctccttactccccaatatatacgtcttggatagactgttggtgcatgctacaaaaagaggggaatatgagccgaggaaatagcttatttttccggaaggtcccctttgggaagacttattgttgtgacctgaaaatgttaatttgaagatgtggggcagggacagtgacatttctgtagtcccagatgcacagaattatgggagagaatgttgatttctatacagtgtggcgcgcttttttaataatcatttaatcttgggaaaaaaaaaaaaaaaaaaaaaaaaaaacggggggggcccggaacccanttc

SEQ ID NO: 215 - DNA, 3323 bp, Homo sapiens
ggggcaaaaaggccgagggggcccagaatcagggcaaaaaggccgagggggcccagaaccagggcaagaaggcmgagggggcccagaaccagggcargaaggccgagggggcccagaaccaggrcaagaaggccgaggggrcccmkaaccagggcargaaggccgagggggcccmgaaccagggcargaaggccgagggggcccagaaccagggcaagaaggccgagggggcccagaaycagggcaagaaggccgagggggcccagaaycagggcaagaaggccgagggggcccagaaycagggcaagaaggccgagggggcccagaaccagggcaagaaggccgagggkgctcagaaccagggcaaaaaagtakaaggggcccagaaccagggcaagaaggctgagggggcccagaaccagggcaagaaggccgagggggctcagaaccagggcaaaaaggccgagggagcccagaaccagggccaaaaaggagagggagcccagaatcagggtaaaaagacagaaggggctcagggcaaaaaggcagaaaggagtcccaaccaaggcaaaaaaggagagggagctcccatccagggcaaaaaggcagattcggttgctaatcagggcacaaaggtagagggtattacaaaccaggggaaaaaagcagaagggtcccccagtgaaggcaaaaaggcagaagggtcccccaaccaaggcaaaaaggcagacgcagctgccaatcagggtaaaaagacagagtcagcttctgtccagggcagaaatacagatgtggcccagagcccagaggcaccaaagcaagaggctcctgccaagaagaagtctggttcaaagaaaaaaggtgagcctgggcccccagatgccgacggccctctctacctcccctacaagacgctggtctccacggttgggagcatggtgttcaacgagggcgaggcccagcggctcatcgagatcctgtctgagaaggctggcatcattcaggacacctggcacaaggccactcagaagggtgaccctgtggcgattctgaaacgccagytggaagagaaggaaaaactgctggccacagaacaggaagatgcggctgtcgccaagagcaaaytgagggagctcaacaaggagatggcagcagaaaaggccaaagcagcagccggggaggccaaagtgaaaaagcagctggtggcccgggagcaggagatcacggctgtgcaggcacgcatgcaggccagctaccgggagcacgtgaaggaggtgcagcagctgcagggcaagatccggactcttcaggagcagctggagaatggccccaacacgcagctggcccgcctgcagcaggagaactccatcctgcgggatgccttgaaccaggccacgagccaggtggagagcaagcagaacgcagagctggccaagcttcggcaggagctcagcaaggtcagcaaagagctggtggagaagtcagaggctgtgcggcaagatgagcagcagcggaaagctctggaagccaaggcagctgccttcgagaagcaggtcctgcagctgcaggcgtcccacagggagagtgaggaggccctgcagaagcgcctggacgaggtcagccgggagctgtgccacacgcagagcagccacgccagcctccgggcggatgccgagaaggcccaggagcaacagcagcagatggccgagctgcacagcaagttacagtcctccgaggcggaggtgcgcagcaaatgcgaggagctgagtggcctccacgggcagctccaggaggccagggcggagaactcccagctcacagagagaatccgttccattgaggccctgctggaggcgggccaggcgcgggatgcccaggacgtccaggccagccagscggaggctgaccagcagcagactcgcctcaaggagctggagtcccaggtgtcgggtctggagaaggaggccatcgagctcagggaggccgtcgagcagcagaaagtgaagaacaatgacctccgggagaagaactggaaggccatggaggcactggccacggccgagcaggcctgcaaggagaagctgcactccctgacccaggccaaggaggaatcggagaagcagctctgtctgattgaggcgcagaccatggaggccctgctggctctgctcccagaactctctgtcttggcacaacagaattacaccgagtggctgcaggatctcaaagagaaaggccccacgctgctgaagcacccgccagctcccgcggagccctcctcggacctggcctccaagttgagggaggccgaggagacgcagagcacactgcaggccgagtgtgaccagtaccgcagcatcctggcggagacggagggcatgctcagagacctgcagaagagcgtggaggaggaggagcaggtgtggagggccaaggtgggcgccgcagaggaggagctccagaagtcccgggtcacagtgaagcatctcgaagagattgtagagaagctaaaaggagaacttgaaagttcggaccaggtgagggagcacacgtygcatttggaggcagagctggaaaagcacatggcggccgccagcgccgagtgccagaactacgccaaggaggtggcagggctgaggcaacttctcctagaatctcaatctcagctcgatgccgccaagagcgaagccagaaacagagcgatgagcttgccctggtcaggcagcagttgagtgaaatgaagagccacgtagaggatggtgacatagctggggccccagcttcctccccagaggcgcccccagccgagcaggaccccgttcagctgaagacgcagctggagtggacagaagccatcctggaggatgagcagacacagcggcagaagctcacggccgagtttgaggaggctcagacctcggcatgtcggttacaagaagaattggagaagctccgcacagccggccccctagagtcttcagaaacagaggaggcctcacagctgaaggagagactagaaaaagagaagaagttaacaagtgacctggggcgcgccgccacgagactgcaggagcttctgaagacgacccaggagcagctggcaagggagaaggacacggtgaagaagctgcaggaacagctggaaaaggcagaggacggcagcagctcaaaggagggcacctctgtctgagtttcctctttggaaaaagaagttactgttcaacttaccaaaatgccttacacattccttacaaataaaccaaccaacctacaaaaaaaaaaaaaaaaaaaactcgagggggggcccggtacccaattcgccc

SEQ ID NO: 216 - DNA, 1408 bp, Homo sapiens
taaactatttatcttgtgtgtgtacatttgtgggtggagtttgtgcgcctggtttttttgtttggaaaacactgcgtggtcaatgtggttatgggggggagtgatgcatttttttctagtcttaaaactaaaaacttgagtctaccatttcttggttgcactgaaaataccgcccagcctgatggtgttcccgtgctgtccctcccccttcccttctccccgcgtctacctccccaccccgttctgttccccctccctccttctccctctccctcaaatccgtgagttttggaagccccagggcctctctcccccgcccctcctggatgaggccaccatcccccaaaccggcttgttttgcagtttccccaggatcctggaagctcgctggcgctcgagggtggcggggacacgggggggtgggtgaaggttcgttaccttttctagtgcgttctatcatagttaacggttgcacacttttttaaaaaaagtaaatggatttgccacaattaaatgtcataacatttatgacagaatataaaatattaacatattttaagccaagttttaggtgtattttttgaatcttggttataaacccaattttaaagggcgatgtatccagcgttgtgaaggcaacagagtgtacccatatttatatttttataaaatacctataagactgtgaatctcttgtgctaatggctgagttaattgaaggatcgttttgcccctttttagcctcccagagcttcgaggactcaattcgaacccgaaatcctgccgtgggggaggggttgcgtcgagacctgggcccggggaggttctcctgcgtcactttctgtcctgaaaggcgcccttcctggtttctgtggctccaattttctatgcagccccacaccccttgttgttttgatcctgagaaataaaagggaggctgaattattcaaatttaaatgaggtttccccttcatggaagtgctgctgacccttcgtgcagaaatggggagcacttgaggacacaggtgggtggaggccctttgtgcgtggctggtcgtattcgggcagccctccgtcgctttttataaaactttgtgtgagaagaatatattgataatgtcagtgaaacaagcagacattgaaatggaggcacagattactccacaaggagttcttctgtatattttttctagatgcaaatacctttttaattatgttaattaatgttaagactttctaggcttatatcgaagctgtgtgtgggtcacggggtgatcactgctaactggataaagtttgtgcagcacattcctgagtgtacgatattgacctgtagcccagcgtgaaaaatttataaataaatttttcattgatctttttatattaaaaaaaaaaaaaaaaaaaaaaa

SEQ ID NO: 217 - DNA, 2111 bp, Homo sapiens
  misc_feature (2102): n equals a,t,g, or c
  misc_feature (2104): n equals a,t,g, or c
ggcacgaggagcattccatatagaaactgctgaaactgccacaggtgcttctccgaaaaccttacagttgtggcattgaatgttcagtatcgcttcctttctgcacacgaggcatactgttgagcctgagaaatgccagtggcctgacagcagcagacattgcacaaacccagggtttccaagagtgtgcccagtttctcttgaacctccagaattgtcatctgaaccatttctataacaatggcatcttaaatgggggtcatcagaatgtatttcctaatcatattagtgtgggaacaaatcgaaagagatgcttgggaagactcagaagactttggagtaaagaaagctagaactgaagctcaaagcttggattctgccgtgccactcacgaatggcgacacagaagacgatgctgacaaaatgcacgttgatagggagtttgctgttgtaacagatatgaaaaacagtagctccgtatcgaatacattgacaatggatgtgtcatcaatggacatttggacttcccctccacgaccccgctcagtgggatggaaagcaggaatggccagtgcttgacaggaactaacggaattagcagtggattagccccaggacagccgtttccgagtagccagggttctctctgcattagtgggactgaggagccagagaagaccctgagagctaaccctgagttgtgcggttctctgcacctgaacgggagtccaagtagctgcatagccagtaggccttcctgggtggaagacattggggataacctgtactatggacactaccacgggtttggggacactgctgaaagcatgcccagaactgaacagtgtggtcgagcattccaagtccgtgaaggtgcaggagcggtacgacagtgccgtgctgggcaccatgcacctgcaccacggctcctagagacgctgacctggctctcggaaacgcaggagtccttcctggtagccagctcagaatacccatgtagcagcaacttgaacgaatgtcacaacttgtactttttttatatacttcaactttctgaaaaagtaaacttcgacaagttcccagcaactgcttgtttgtgcatgagtagggcttactaagtgcatagatgtttctacagtgaggtgtcctttttataaggtgcacttttggagtttttctgatgccaatctcaacattgtctttttaatactgtcaccagatattgccatttttctttttgttaaaagattatatgatcaagataaattggggtggtaaatcaggtgcctggtaatttatctctttgcacatgggcatcattttaaaaagcttgcttccactcttttctgtagaatttgacggaacacagctatttccctatgcaaggtacagccttacaaagatttctgcagtgatttgtgtgaagaagagaatgtttgtctttttcaatgaagctttgcagatcaccatgtggttgaaggttttagttgtggacacagtggtccctccttaatgatgaagatcactgccttgggcttcatggaaaacaggcccagcctggggctgcgtttggatttattgtttttattccacacttcctacttggtctctggaagttttaccacatgtaacagattcctttatatgtagtgaaaatcactatttgtagaaactgtcaggtcaaaatatttaactgactgttgacatgtattttcttttttccttgtttttgttttttggggttttctgctttaagatatataccactatgtatatccagttaactgagagaattttgactctcttaataaaactgcattaagtttttgattttgtagaaattagcttttgtctaggcaactagtggttatactctgcaaatattgtaatgaatttttacttttttgatttttgtaataaaaattggtgcagataaaatgtcaaatgaacaaaccagtgttctaagagtgttactaacattttgttctaaaactgtccttcacaaattgaataaaaaactctcacactcaaaaaaaaaaaaaaaaaaaaaaaaaaaaaaaaaaaaaaaaaaaaaaaaaaaaaaaaaaaaaaaaaaaaaaaananaaaaaaa

SEQ ID NO: 218 - DNA, 2493 bp, Homo sapiens
ggcccggtggggccggccgggactcgccgctcgcacgcccttgggccgcggccgggcgcccgctcttccttccgcttgcgctgtgagctgaggcggtgtatgtgcggcaataacatgtcaaccccgctgcccgccatcgtgcccgccgcccggaaggccaccgctgcggtgattttcctgcatggattgggagatactgggcacggatgggcagaagcctttgcaggtatcagaagttcacatatcaaatatatctgcccgcatgcgcctgttaggcctgttacattaaatatgaacgtggctatgccttcatggtttgatattattgggctttcaccagattcacaggaggatgaatctgggattaaacaggcagcagaaaatataaaagctttgattgatcaagaagtgaagaatggcattccttctaacagaattattttgggagggttttctcagggaggagctttatctttatatactgcccttaccacacagcagaaactggcaggtgtcactgcactcagttgctggcttccacttcgggcttcctttccacagggtcctatcggtggtgctaatagagatatttctattctccagtgccacggggattgtgaccctttggttcccctgatgtttggttctcttacggtggaaaaactaaaaacattggtgaatccagccaatgtgacctttaaaacctatgaaggtatgatgcacagttcgtgtcaacaggaaatgatggatgtcaagcaattcattgataaactcctacctccaattgattgacgtcactaagaggccttgtgtagaagtacaccagcatcattgtagtagagtgtaaaccttttcccatgcccagtcttcaaatttctaatgttttgcagtgttaaaatgttttgcaaatacatgccaataacacagatcaaataatatctcctcatgagaaatttatgatcttttaagtttctatacatgtattcttataagacgacccaggatctactatattagaatagatgaagcaggtagcttcttttttctcaaatgtaattcagcaaaataatacagtactgccaccagattttttattacatcatttgaaaattagcagtatgcttaatgaaaatttgttcaggtataaatgagcagttaagatataaacaatttatgcatgctgtgacttagtctatggatttattccaaaattgcttagtcaccatgcagtgtctgtatttttatatatgtgttcatatatacataatgattataatacataataagaatgaggtggtattacattattcctaataatagggataatgctgtttattgtcaagaaaaagtaaaatcgttctcttcaattaatggcccttttattttgggaccaggcttttattttccctgatattatttctatttaatactcttttctctcaagaaaaaaaaaaaagtttgttttttctttattgtccttcatagcaggccaagtattgcctctctgcaatagacagctactgtcaatacatgctgtaatttgacattctgggtcacagatataaggtatttaaaatctatttatgctttatagagaaaccagacattaaaacttcatgcactacttatttcgaattactgtaccttatccaaatttacacctagctattaggatcttcaacccaggtaacaggaataattctgtggtttcatttttctgtaaacaactgaaagaataattagatcatattctagtatgttctgaaatatctttaagactgatcttaaaaactaacttctaagatgatttcatcttctcatagtatagagtttactttgtacacgtttgaaaccaactactgtagaagatgaggaatctattgtaattttttgctttattttcatctgccagtggacttatttgaaattttcactttagtcaaattattttttgtattagtttttgatgcagacataaaaatagcaatcattttaaattgtcaaaatttccagattactggtaaaaattatttgaaaacaaacttatgggtaataaaggctagtcagaaccctataccataaagtgtagttaccatacagattaatatgtagcaaaaatgtatgcttgatatttctcaactgtgttaatttttctgctgtattccagctgaccaaaacaatattaagaatgcatctttataaatgggtgctaattgataatggaaataatttagtaatggactatacaggatgttaataatgaagccatatgtttatgtctggatttaaaaattttaaacaatcatttactatgtcatttttctttaccttgaagaacataaactgttatttcacttctacaaatcagcaagatattatttatggcaagaaatattccattgaaatattgtgctgtaacatgggaaagtgtaaatgtttttcatggtttctatcaatgtgaaataaaatttaattctgaaaaaaaaaaaaaaa

SEQ ID NO: 219 - DNA, 1259 bp, Homo sapiens
gcgccgcggtgccggaaccgctgggcgggagcgaggcggtgcggctgcagctgcagggcgaggagctgcggctgcaggaggagagcgtgcggctgcaccagattaacatctacctcagcgaccgcatctcactgcaccgccgcctgcccgwgcgctggaacccgctgtgcaaagagaagaaatatgattatgataatttgcccaggacatctgttatcatagcattttataatgaagcctggtcaactctccttcggacagtttacagtgtccttgagacatccccggatatcctgctagaagaagtgatccttgtagatgactacagtgatagagagcacctgaaggagcgcttggccaatgagctttcgggactgcccaaggtgcgcctgatccgcgccaacaagagagagggcctggtgcgagcccggctgctgggggcgtctgcggcgargggcgatgttctgaccttcctggactgtcactgtgagtgccacgaagggtgctggagccgctgctgcagaggatccatgaagaggagtcggcagtggtgtgcccggtgattgatgtsatcgactggaacaccttcgaatacctggggaactccggggagccccagatcggcggtttcgactggaggctggtgttcacgtggcacacagttcctgagagggagaggatacggatgcaatcccccgtcgatgtcatcaggtctccaacaatggctggtgggctgtttgctgtgagtaagaaatattttgaatatctggggtcttatgatacaggaatggaagtttggggaggagaaaacctcgaattttcctttaggatctggcagtgtggtggggttctggaaacacacccatgttcccatgttggccatgttttccccaagcaagctccctactcccgcaacaaggctctggccaacagtgttcgtgcagctgaagtatggatggatgaatttaaagagctctactaccatcgcaacccccgtgcccgcttggaaccttttggggatgtgacagagaggaagcagctccgggacaagctccagtgtaaagacttcaagtggttcttggagactgtgtatccagaactgcatgtgcctgaggacaggcctggcttcttcgggatgctccagaacaaaggactaacagactactgctttgactwtaaccctcccgatgaaaaccagattgtgggacaccaggtcattctgtacctctgtcatgggatgggccagaatgacctggtgc

SEQ ID NO: 220 - DNA, 1849 bp, Homo sapiens
  misc_feature (920): n equals a,t,g, or c
ctgttgtatggagcagggtgtgtgggttttctgggcccatcattatggctgcttcagagtcagaagaaagccatagggcagtaggggagctcctattgcctagcccctctccctttgtggctcccactctagctgcctatttttgctcatcagctggtgagtcagtatgggccagcagttctccctccctaagcccttgctactttatgggttagctttgcaggtttggtggcttgaggggtgggggcaactcaccactgccaggtaactccctgaagggtgggagtggattatcttctaggctcttacccgcggtagggaagggcatcaacactgtcttccttccattctcctttcccccatcccatttagtgctgccacagggcagaagcacacaaaccaaccacacagtctctgacttctcctaagcactttgagttgttgaatggggctcaggggcaagagtttttgctgccctccccagcgtggtcacagggttattgaactgcctgcacttgtttctcatgcaactccagcattttccccagaagttgaactatggatagcagcttggtatggatttcctaaatcttaacatttgaagcagcttcttgaggctggcaactatcctggtttctgtcttggagggggtggtttgtttgctggggcccaacgtctgtcccaagtggtggggtgagagtaagttaactttggtgccaggtgagaggtgggggctctttgcttagactccctatcatggaaagattggagttttctatgcagggcactggggaaaaggattgctgattctgactgaccctgatcagagagattaggattgtattttgacataggatttggaacccatctaaatgttgaagttccctgagacagctctccagctgctgagcctgcgccangggctaagcagcccctaatgagaggctctgctccctttcccacctcgccaatgttgttgttgctgcctttttgatttgtatcctctgttatagacattttttaaaaacgatttcctctttcattgtgcacaagtgctgagagtctgaggccccatttctgctgtgtatatatatcctgactcggggcttttattcagcaaactgttcattcttctgtcagacaatgtcatattcaactctgttcatattaaaccactgtgaagcaagcctctgttttcctgcttaagttgtaaatttagtattctttagtgtctaggatatgctgggtattatgcagaaatcatacagtgtggccagtgtcctgaggtaatgttttgcatttaaatttttttagaaagcagaatcttaacttatcttaatgatatttacctatcctttttgcaactcacaactgactttgtcacagaggtaatgcatctgcttgcaggaagtarctgtaggctcagtacctgttgkttgagtcagatttagcagatttggtttttaagcttgtgggtttgkgctaatttgggcagaatatatttattatatatgtgtgtgtgtatgtktgtatgtgtgtgtctgcatatgtaatacatgtacataaacacacatgcatgtgttcatcctctgacacacccacacaacaccaacaaacatttcttctataggctttttatctcaactgacactgttttttttcccaaataaatttgacacaggcagaaaggtgggtgaactctcagaacttttggtgggtggatattcatctgaccagtgagctctgaaatggtttccctacacagagtgggttttggcaagggttggaatgaggggaggtagcagtcttgtcatttagaaaatcaaagctagttttgatgtagctcaac

SEQ ID NO: 221 - DNA, 1267 bp, Homo sapiens
  misc_feature (11): n equals a,t,g, or c
  misc_feature (17): n equals a,t,g, or c
  misc_feature (26): n equals a,t,g, or c
  misc_feature (1244): n equals a,t,g, or c
  misc_feature (1252): n equals a,t,g, or c
  misc_feature (1264): n equals a,t,g, or c
cggattatgcngamacnccccagggnttrtgctatgacgtcgcatgcacgcgtaagcttgggcccctcgagggatcctctagagcggccgccgcggcattcggggaatctgcagggcagatgagtaacgaaagaggctttgaaaatgtagaactgggagtcataggaaaaaagaagaaagtcccaaggagagtcatccactttgttagtggtgaaacaatggaagaatatagcacagatgaagacgaagttgatggcctggagaagaaagatgttttgcctactgttgatccgacaaaacttacctggggtccctacttatggttttacatgcttcgggctgctacatcaactctctcagtgtgtgacttccttggagagaagattgcatctgttttgggtatcagcaccccaaagtaccaatatgccattgatgaatattatcggatgaagaaggaggaagaagaagaagaagaagaaaacaggatgtctgaagaagcagaaaaacaatatcaacagaataaattgcagactgattccattgttcagacagatcaaccagagacagtgatatccagctcatttgtgaatgtcaattttgaaatggagggagacagtgaagtaattatggaaagcaagcaaaatccagtctctgtcccaccataaaatgaaatgactatcaagcttcaaactcttaagttttttttttttaatacaaaaactttcacattctttattcagtgggacttaatacaattatttatattttaaattattaaagtatctggaaagggaaaatgttttcttcatttttaggatctatctagcaaaagccagatctgaaattcagatatttgtactgtttttactgtgtatagaaattagtgctttggttttaaaatgatcttttaaaaaagttaaggacatcctagagccttaatagttaagaagagttaaattatcaagcctatttgtgcatttgctttttttgaaaaaggtaagttgctgattaagtctaattggaattgataattccatagtcttagattaaaatgaggatattttctcctagattttctcatgttatgccatgcatttatatatctaaccattaatttcacactaaggatgcttcaccatataataaaaggagcaagatggaaaaaaaaaaaaaaaaaaaaaaaaaaaaaaaaaaaaaaaaaaaaggggcggacgcgtgggtccgacccgggaattcccggatcngtcactgncgggctgacttntct

SEQ ID NO: 222 - DNA, 754 bp, Homo sapiens
  misc_feature (702): n equals a,t,g, or c
  misc_feature (710): n equals a,t,g, or c
  misc_feature (754): n equals a,t,g, or c
cagagaactgagatgaaagcaatgatgaagggaccctgggaccctgcctttcctctccctactcagcaggagcttatgaagtcatctcactttctcttctgtcccccctctcctcttcatgcaggtataaagaaatatgaggccccaattggaacagcagcatggagggtcccagttgggtccccaacgtgctccccatgggcaagacaatggaaacttccacaagcagggaaggcaaaccctctttattgaacattagccagcccagcccagaccccagggctgctaaggacacagagattctccatgggaaggggactgccaagcatgaggaaatagaagattcaggggcctgarctctggaagctgcaagcaaaagggatgggactagggctgagttgtgtctycattttgataaggaaaggatatgctcacactcttgcttgttcagattccaagacagaaggcttcacaaggccaacgcctggaaaatgggcatctctccctcccatgttaagctttaacctctgtaatctgcctgtatctataggtgggcatctcactccatcaaaggagcccagcctcttttgtcctctaccatgcacagtctttctgtgcatttccccaagctgggccctcttctactctcatttaggcctgtgataactcattacccacccatcacttgtgtcttcagggcanacttggcnaagcagggaattgccttggacataaattgaagggcactcctttn

SEQ ID NO: 223 - DNA, 1258 bp, Homo sapiens
  misc_feature (41): n equals a,t,g, or c
  misc_feature (1205): n equals a,t,g, or c
  misc_feature (1241): n equals a,t,g, or c
  misc_feature (1247): n equals a,t,g, or c
aacgatacagccaaggmgatcaccatcaacaagattctktnccaacgwgagccttgtgcaggagaacctgtacttccagcgctgcctagactggaaccgtgacatcctcaagaaggagctgggactgacagagcaggacatcattgacctgcccgctctgttcaagatggacgaggaccaccgtgccagagccttcttcccaaacatggtgaacatgatcgtgctggacaaggacctgggcatccccaagccattcgggccacaggttgaggaggaatgctgcctggagatgcacgtgcgtggcctcctggagcccctgggcctcgaatgcaccttcatcgacgacatttctgcctaccacaaatttctgggggaagtccactgtggcaccaacgtccgcaggaagcccttcaccttcaagtggtggcacatggtgccctgaccctccaggggccctggcgtttgcctccttmgcttarttctccagaccctycctcacaygcccagagccttctgctgacatggactggacagccccgctgggagacctttgggacgtggggtggaatttggggtatctgtgccttgccctccctgagaggggcctcagtgwcctctgaagccatccccagtgagcctcgactctgtccctgctgaaaatagctgggccagtgtctctgtagccctgacataaggaacagaacacaacaaaacacagcaaaccatgtgcccaaactgctccccaaaraattttgagtctctaatctgacactgaatgaggggagaagggaaggagattctgggattgccagttcttccagcagccatgctctgaaaatcaaggtagaatccatggaaagggaccccaggaccccgggaccctagacgtatcttgaactgccatcgtcatttcaaatacatctccctcagggtttccaggtggccacccccaatwattcattccttaccaacctctcaaatcctcttggctttctctctgcagtgtggacactgttggctagtcctccccactccctgagggtccagtaagttagcttagaaccttcctgggaaacatttcatctggaggcaggkttccccacgtgtgggatgctcctttttgcctcatctgtcttcaggggatggcaggctcccccgcattgcatgggggattttttccccagaccaggcataatttgtggacntgaggagtttcaatgtgttaaagatggccctgggtnaagccntattccatctt

SEQ ID NO: 224 - DNA, 584 bp, Homo sapiens
  misc_feature (494): n equals a,t,g, or c
  misc_feature (495): n equals a,t,g, or c
  misc_feature (577): n equals a,t,g, or c
  misc_feature (583): n equals a,t,g, or c
cttacccagaaggcaacgcttctctttctggtcaaaatggctggtaagcaggccgtttcagcatcaggcaagtggctggatggtattcgaaaatggtattacaatgctgcaggattcaataaactggggttaatgcgagatgatacaatatacgaggatgaagatgtaaaagaagccataagaagacttcctgagaacctttataatgacaggatgtttcgcattaagagggcactggacctgaacttgaagcatcagatcttgcctaaagagcagtggaccaaatatgaagaggaaaatttctaccttgaaccgtatctgaaagaggttattcgggaaagaaaagaaagagaagaatgggcaaagaagtaatcatgtagttgaagtctgtggatgcagctgttatgaagatggttaaacttgaaacaaacaattttaagaattatttggtctgaagatgttttactttaaataaatgtctattgtaatggcwnnaaaaaaaaaaaaaaaaaaaaaaaaaaaaaaaaaaaaaaaaaaaaaaaaaaaaaaaaaaaaaaaaaaaaaaaaaaaaaggggnggccgnt

SEQ ID NO: 225 - DNA, 3449 bp, Homo sapiens
  misc_feature (2330): n equals a,t,g, or c
  misc_feature (3434): n equals a,t,g, or c
  misc_feature (3443): n equals a,t,g, or c
gcgagcacgttagaaagcctgacatggcctgactcgggacagctcagagcagggcagaactggggacactctgggccggccttctgcctgcatggacgctctgaagccaccctgtctctggaggaaccacgagcgagggaagaaggacagggactcgtgtggcaggaagaactcagagccgggaagcccccattcactagaagcactgagagatgcggccccctcgcagggtctgaatttcctgctgctgttcacaaagatgctttttatctttaactttttgttttccccacttccgaccccggcgttgatctgcatcctgacatttggagctgccatcttcttgtggctgatcaccagacctcaacccgtcttacctcttcttgacctgaacaatcagtctgtgggaattgagggaggagcacggaagggggtttcccagaagaacaatgacctaacaagttgctgcttctcagatgccaagactatgtatgaggttttccaaagaggactcgctgtgtctgacaatgggccctgcttgggatatagaaaaccaaaccagccctacagatggctatcttacaaacaggtgtctgatagagcagagtacctgggttcctgtctcttgcataaaggttataaatcatcaccagaccagtttgtcggcatctttgctcagaataggccagagtggatcatctccgaattggcttgttacacgtactctatggtagctgtacctctgtatgacaccttgggaccagaagccatcgtacatattgtcaacaaggctgatatcgccatggtgatctgtgacacaccccaaaaggcattggtgctgatagggaatgtagagaaaggcttcaccccgagcctgaaggtgatcatccttatggacccctttgatgatgacctgaagcaaagaggggagaagagtggaattgagatcttatccctatatgatgctgagaacctaggcaaagagcacttcagaaaacctgtgcctcctagcccagaagacctgagcgtcatctgcttcaccagtgggaccacaggtgaccccaaaggagccatgataacccatcaaaatattgtttcaaatgctgctgcctttctcaaatgtgtggagcatgcttatgagcccactcctgatgatgtggccatatcctacctccctctggctcatatgtttgagaggattgtacaggctgttgtgtacagctgtggagccagagttggattcttccaaggggatattcggttgctggctgacgacatgaagactttgaagcccacattgtttcccgcggtgcctcgactccttaacaggatctacgataaggtacaaaatgaggccaagacacccttgaagaagttcttgttgaagctggctgtttccagtaaattcaaagagcttcaaaagggtatcatcaggcatgatagtttctgggacaagctcatctttgcaaagatccaggacagcctgggcggaagggttcgtgtaattgtcactggagctgcccccatgtccacttcagtcatgacattcttccgggcagcaatgggatgtcaggtgtatgaagcttatggtcaaacagaatgcacaggtggctgtacatttacattacctggggactggacatcaggtcacgttggggtgcccctggcttgcaattacgtgaagctggaagatgtggctgacatgaactactttacagtgaataatgaaggagaggtctgcatcaagggtacaaacgtgttcaaaggatacctgaaggaccctgagaagacacaggaagccctggacagtgatggctggcttcacacaggagacattggtcgctggctcccgaatggaactctgaagatcatcgaccgtaaaaagaacattttcaagctggcccaaggagaatacattgcaccagagaagatagaaaatatctacaacaggagtcaaccagtgttacaaatttttgtacacggggagagcttacggtcatccttagtaggagtggtggttcctgacacagatgtacttccctcatttgcagccaagcttggggtgaagggctcctttgaggaactgtgccaaaaccaagttgtaagggaagccattttagaagacttgcagaaaattgggaaagaaagtggccttaaaacttttgaacaggtcaaagccatttttcttcatccagagccattttccattgaaaatgggctcttgacaccaacattgaaagcaaagcgaggagagctttccaaatactttcggacccaaattgacagcctgtatgagcacatccaggattaggataaggtacttaagtacntgccggcccactgtgcactgcttgtgagaaaatggattaaaaactattcttacatttgttttgcctttcctcctatttttttttaacctgttaaactctaaagccatagcttttgttttatattgagacatataatgtgtaaacttagttcccaaataaatcaatcctgtctttcccatcttcgatgttgctaatattaaggcttcagggctacttttatcaacatgcctgtcttcaagatcccagtttatgttctgtgtccttcctcatgatttccaaccttaatactattagtaaccacaagttcaagggtcaaagggaccctctgtgccttcttctttgttttgtgataaacataacttgccaacagtctctatgcttatttacatcttctactgttcaaactaagagatttttaaattctgaaaaactgcttacaattcatgttttctagccactccacaaaccactaaaattttagttttagcctatcactcatgtcaatcatatctatgagacaaatgtctccgatgctcttctgcgtaaattaaattgtgtactgaagggaaaagtttgatcataccaaacatttcctaaactctctagttagatatctgacttgggagtattaaaaattgggtctatgacatactgtccaaaaggaatgctgttcttaaagcattatttacagtaggaactggggagtaaatctgttccctacagtttgctgctgagctggaagctgtgggggaaggagttgacaggtgggcccagtgaacttttccagtaaatgaagcaagcactgaataaaaacctcctgaactgggaacaaagatctacaggcaagcaagatgcccacacaacaggcttattttctgtgaaggaaccaactgatctcccccacccttggattagagttcctgctctaccttacccacagataacacatgttgtttctacttgtaaatgtaaagtctttaaaataaactattacagatamttaaaaaaaaaaaaaaaaaaaaaaaaaaaaaaaaaaaaaaaaaaaaaaaaaaaaaaaaaaaaaaaaaaaaaaaaaaaaaaaaaaaaaaaaaaaaaaaaaaaaanggggggccnttttaa

SEQ ID NO: 226 - DNA, 1866 bp, Homo sapiens
  misc_feature (1859): n equals a,t,g, or c
caccaatgttgataaactggtgaaggacatttacggaggagactatgaacgatttggccttcaaggatctgctgtagcatcaagctttggcaacatgatgagtaaagaaaagcgagattccatcagcaaggaagacctcgcccgggccacattggtcaccatcaccaacaacattggctccattgctcggatgtgtgcgttgaatgagaacatagacagagttgtgtttgttggaaattttctcagaatcaatatggtctccatgaagctgctggcatatgccatggatttttggtccaaaggacaactgaaagctctgtttttggaacatgagggttattttggagccgttggggcactgttggaactgttcaaaatgactgatgayaagtagagacgagcagtggaggaaacagcctcccaaaaggacagagaactaaaaaattgctgctggagaaggtgaaagtcgctttgggacggaagccaagccattatggcagatgaacctgctggatttgtaaataatttaaaatccttccagatgatcttttactcttaggttttgagctaatgattcaaaacgggggaatataaaaggttttttttctgtatactgtatttttttaaaaaaatggtgcagcgtggccaaacctaccaattgtatgcattaactttgaaaagttgtttgatgtttaagaaggacctgatatgtaagcgctggtcatttttcttctggggtttactgatcagtgtggtgattttaacttcatttagtaattactctaggagattttaccttgacttatatttttcatgacgtttcatgatttgctgttggtttcaaatgaaactacaaatctggcatgttttactgtgaacacttttgttatttgttttgtacccttttttgtcttgkttttctgktttagttgkcttctgaaaaaagagtcgttccctctgtttctgtcctcagatgatgtccctccccctacctgtaacctttctttgacataattgttcatatcaatgaaggtgctgaccagctcaatacaaagttaagcacaagatctaaagctcttgaaaatgcccgtgaagagaagactgaatgtgttaatgaatttaatgagtctggcaaaagttgcaaattatatgcaagtttgtcctatcgcttataaatgtagtgtttcattggatttattttatgctaggttatattaagttgaaatagtctgtgattaaatgtcctcatccatgcacagaatatgaatggcagcaaatctttgtgcaagaaatttgaaacttattgggaaaagcctcccagtagattaattgttcatatcaggagatttagggtaagtcatgggttgaggtgtcagatagtaatatctatttgttttgtacatgtatatatctaggaactttgtaacaacacatctttaataatgttaaaggttttttcatttttaatattttaaactaaaaactgtacttcaatctcagtttctaaaattaaaaataatttatactgatctatatattttttctttttgaaagatttcattaagactgatgggtaactttcaaatgagggtcatgtacaaatattgggatgcatgagatcccatgatcttgtgtattgagcttattgttgaaagggatttttgaaggacagaacaattactccatgatgaatcttcctttctctgccttctgagcaccgtctttaatttccatatcttcaagtcttgaagaagttgatgttaattgaagaattcacttgtctggttgaaataaagcctgtttctgttgtgaaaaaaaaaaaaaaaaactsgtggggggcccggacccaattgccctangggagcc

SEQ ID NO: 227 - DNA, 1064 bp, Homo sapiens
  misc_feature (209): n equals a,t,g, or c
ggcaacagcatggccacaattttatagcagcaaaatgaagcaaaaatcaaaggagttagcaaaggcagaaacatatgtgtagtgtgctgccagcataagatggaagaacttaaagaaggcctgcggcaaagagatgagcttattgaggagaagcagcgcatgcagcagaaaatagacaccatgacaaaagaggtgtttgacctccaggngacacttctttggaaagataaaaaaattgrgaaacatggcttagttataatccccgatggcactcccaatggtgatgtcagtcatgaaccagtggctggagccatcactgttgtgtctcaggaagctgctcaggtcttggagtcagcaggagaagggccattagatgtaaggctacgaaaacttgctggagagaaggaagaactactgtcacagattagaaaactgaagcttcagttagaggaggaacgacagaaatgctccaggaatgatggcacagtgggtgacctggcaggactgcagaatggctcagacttgcagttcatcgaaatgcagagagatgccaatagacaaattagcgaatacaaatttaagctttcaaaagcagaacaggatataactaccttggagcaaagtattagccggcttgagggacaggttctgagatataaaactgctgctgagaatgctgagaaagttgaagatgaattgaaagcagaaaaacggaagctacaacgagagttacgaacagcactggacaagattgaggagatggagatgaccaacagccacctggccaagcggctggagaagatgaaggccaataggacagcacttctggcccagcagtaggaaaaccacccttcaacctgggtgatgctccttggggccctacctagagggactgacttttgtccattgacacaaaccccttttagtactgttttgagttttgtcattaaaacagccacctttgtattttataatttatgacagratgaagtcattttgaatctacatgaatgaacactttggatttttgttggagtttgattctagggtagaaccagtccatg

SEQ ID NO: 228 - DNA, 373 bp, Homo sapiens
  misc_feature (329): n equals a,t,g, or c
  misc_feature (332): n equals a,t,g, or c
gctgcactctcaggtattccctgctcttactccaaaaagatggacccaggtccgaaggggcactgccactgtggggggcatggccatcctccaggtcactgcgggccaccccctggccatggcccagggccctgcgggccacccccccaccatggcccagggccctgcgggccacccccccaccatggtccagggccctgcgggccaccccctggccatggcccagggccctgcgggccacccccccaccatggtccagggccctgcgggcctccccctggccatggcccaggtcacccaccccctggtccacatcactgaggaagtanaanaaaacaggacacaagatggcaagcctgagagaaattgccca

SEQ ID NO: 229 - DNA, 2844 bp, Homo sapiens
tcgacccacgcgtccgcaggtgttcaagatggcggtagctgaggggttgaccgagagacccagttgamggcctttacgaagtgaaagaggccgggaatcgccccctacccgcttctcgtagtcctgggagcacagcagaagtgtttttctttttttaatgaacaagtaaaccatacaaattgtcaacatgggacggagatctacatcatccaccaagagtggaaaatttatgaaccccacagaccaagcccgaaaggaagcccggaagagagaattaaagaagaacaaaaaacagcgcatgatggttcgagctgcagttttaaagatgaaggatccaaaacagataatccgagacatggagaaattggatgaaatggagtttaacccagtgcaacagccacaattaaatgagaaagtactgaaagacaagcgtaaaaagctgcgtgaaacctttgaacgtattctacgactctatgaaaaagagaatccagatatttacaaagaattgagaaagctagaagtagaatatgaacagaagagggctcaacttagccaatattttgatgctgtcaagaatgctcagcatgtggaagtggagagtattcctttgccagatatgccacatgctccttccaacattttgatccaggacattccacttcctggtgcccagccaccctctatcctaaagaaaacctcagcctatggacctccaactcgggcagtttctatccttcctcttcttggacatggtgttccacgtttgccccctggcagaaaacctcctggccctccccctggtccacctcctcctcaagtcgtgcagatgtatggccgtaaagtgggttttgccctagatcttccccctcgtaggcgagatgaagacatgttatatagtcctgaacttgcccagcgaggtcatgatgatgatgtttctagcaccagtgaagatgatggctatcctgaggacatggatcaagataagcatgatgacagtactgatgacagtgacaccgacaaatcagatggagaaagtgacggggatgaatttgtgcaccgtgataatggtgagagagacaacaatgaagaaaagaagtcaggtctgagtgtacggtttgcagatatgcctggaaaatcaaggaagaaaaagaagaacatgaaggaactgactcctcttcaagccatgatgcttcgtatggcaggtcaagaaatccctgaggagggacgggaagtagaggaattttcagaggacgatgatgaagatgattctgatgactctgaagcagaaaagcaatcacaaaagcagcataaagaggaatcccattctgatggcacatccactgcttcttcacagcagcaggctccgccgcagtctgttcctccttctcagatacaagcacctcccatgccaggaccaccacctcttggaccaccacctgctccaccattacggcctcctgggccacctacaggccttcctcctggtccacctccaggagctcctccattcctgagaccacctggaatgccaggactccgagggcccttaccccgacttttacctccaggaccaccaccaggccgaccccctggccctcccccaggtccacctccaggtctgcctcctggtccccctcctcgtggacccccaccaaggctacctccccctgcacctccaggtattcctccacctcgtcctggcatgatgcgcccacctttggtgcctccccttggacctgccccccctgggctgttcccaccagctcccttgccaaaccctggggttttaagtgccccacccaacttgattcagcgacccaaggcggatgatacaagtgcagccaccattgagaagaaagccacagcaaccatcagtgccaagccacagatcactaatcccaaggcagagattactcgatttgtgcccactgcactgagagtacgtcgggagaataaaggggctactgctgctccccaaagaaagtcagaggatgattctgctgtgcctcttgccaaagcagcacccaaatctggtccttctgttcctgtctcagtacaaactaaggatgatgtctatgaggctttcatgaaagagatggaagggctactgtgacagcttttgatgccagaaaaggcttctgttcacaacagtggcccatggagaaagaggctcttattaaacttagatgaaagagctgcttccattgtcagggtattttctaatttcagttcaaggaatatcctaaaatttagccttgttcagaatttactgcacataaaaaagggtatttcatccagaatagatcagttattgaagcagtgctgctaacatccattccctttcataccaccattttcaccctgtttcttcccctcctccagttctttggaaatttgtgatcgggggatcttagttgcttatttgttttgactcttgtgtgctgtgggcactggagtagagatttctggagaaaaaaaaacagtttatttcatcttgccttttgtgtttgagttatttttaatattttcctgtaaatattttgtaatattttacttgtaatgaaatggatcacaatgtcatttcctaatacaaggcaggatatgtgggaagaatatgtacaattatttgattaaaattatttcccactgacctaaactttcagtgatttgtgggaaaaataaataaatgttctacaccaagatactctgtgttactgataatatgtaaacataatacctattttatgggacaggaaaaagttaaaatatttaaaaacttggggtttttaagggaactgcctttctgggtacagatgaggatcttactggaaaactgggtaaaaa

SEQ ID NO: 230 - DNA, 1798 bp, Homo sapiens
  misc_feature (1): n equals a,t,g, or c
  misc_feature (15): n equals a,t,g, or c
  misc_feature (24): n equals a,t,g, or c
  misc_feature (31): n equals a,t,g, or c
  misc_feature (501): n equals a,t,g, or c
  misc_feature (1798): n equals a,t,g, or c
ngcaaatatacgtgnacacttatnaaaagtnacgcctgacacgtgaccggttccgggaattcccgggtcgacccacgcgtccggcccagcactagaagtcggcggtgtttccattcggtgatcagcactgaacacagaggactcaccatggagtttgggctgagctgggttttcctcgttgctcttttaagaggtgtccagtgtcaggtgcagctggtggagtctgggggaggcgtggtccagcctgggaggtccctgagactctcctgtgcagcstctggattcaccttcagtagctatggcatgcactgggtccgccaggctccaggcaaggggctggagtgggtggcagttatatsrtatgatggaagtaataaatactatgcagactccgtgaagggccgattcaccatctccagagacaattccaagaacacgctgtatctgcaaatgaacagcctgagagctgaggacacggctgtktattactgtgcgaragangttactatggttcggaaagcatctactactactttgactctggggccagggaacmctggtcaccgtctcctcagcctccaccaagggcccatcggtcttccccctggcaccctcctccaagagcacctctgggggcacagcggccctgggctgcctggtcaaggactacttccccgaaccggtgacggtgtcgtggaactcaggcgccctgaccagcggcgtgcacaccttcccggctgtcctacagtcctcaggactctactccctcagcagcgtggtgaccgtgccctccagcagcttgggcacccagacctacatctgcaacgtgaatcacaagcccagcaacaccaaggtggacaagaragttgagcccaaatcttgtgacaaaactcacacatgcccaccgtgcccagcacctgaactcctggggggaccgtcagtcttcctcttccccccaaaacccaaggacaccctcatgatctcccggacccctgaggtcacatgcgtggtggtggacgtgagccacgaagaccctgaggtcaagttcaactggtacgtggacggcgtggaggtgcataatgccaagacaaagccgcgggaggagcagtacaacagcacgtaccgtgtggtcagcgtcctcaccgtcctgcaccaggactggctgaatggcaaggagtacaagtgcaaggtctccaacaaagccctcccagcccccatcgagaaaaccatctccaaagccaaagggcagccccgagaaccacaggtgtacaccctgcccccatcccgggakgagmtgaccaagaaccaggtcagcctgacctgcctggtcaaaggcttctatcccagcgacatcgccgtggagtgggagagcaatgggcagccggagaacaactacaagaccacgcctcccgtgctggactccgacggctccttcttcctctayagcaagctcaccgtggacaagagcaggtggcagcaggggaacgtcttctcatgctccgtgatgcatgaggctctgcacaaccactacacgcagaagagcctctccctgtcyccgggtaaatgagtgcgacggccggcaagcccccgctccccgggctctcgcggtcgcacgaggatgcttggcacgtaccccgtstacatacttcccrggcrcccagcatggaaataaagcacccascrctgccctgggcccctgcaaaaaaaaaaaaaaaaaaaaaaaaaaaaaaaaaaaaaaaaaaaaaaaaaaaaaaaaaaaaaaaaaaaaaaaaaaaaawaaaaaaaaaaaaaaaaaaan

SEQ ID NO: 231 - DNA, 1823 bp, Homo sapiens
  misc_feature (82): n equals a,t,g, or c
  misc_feature (1593): n equals a,t,g, or c
  misc_feature (1714): n equals a,t,g, or c
gtcgcctgccacccgcttcggccacggccagacgcccgcggccttcctcagcgctctgctgccctcgcagccgccgccgggncggtcaacgccctggggctgcccaagggtgtcacccccgcagatttccaaagaaggccagtagaactgctagaatagcctccgatgaggaaattcaaggcacaaaggatgctgttattcaagacctggaacgaaaacttcgcttcaaggaggacctcctgaacaatggccagccgaggttaacatacgaagaaagaatggctcgtcgactgctaggtgctgacagtgcaactgtctttaatattcaggagccagaagaggaaacagctaatcaggaatacaaagtctccagctgtgaacagagactcatcagtgaaatagagtacaggctagaaaggtctcctgtggatgaatcaggtgatgaagttcagtatggagatgtgcctgtggaaaatggaatggcaccattctttgagatgaagctgaaacattacaagatctttgagggaatgccagtaactttcacatgtagagtggctggaaatccaaagccaaagatctattggtttaaagatgggaagcagatctctccaaagagtgatcactacaccattcaaagagatctcgatgggacctgctccctccataccacagcctccaccctagatgatgatgggaattatacaattatggctgcaaaccctcagggccgcatcagttgtactggacggctaatggtacaggctgtcaaccaaagaggtcgaagtccccggtctccctcaggccatcctcatgtcagaaggcctcgttctagatcaagggacagtggagacgaaaatgaaccaattcaggagcgattcttcagacctcacttcttgcaggctcctggagatctgactgttcaagaaggaaaactctgcagaatggactgcaaagtcagtgggttaccaaccccagatctaagctggcaactagatggaaagcccgtacgccctgacagtgctcacaagatgctggtgcgtgagaacggggtgcactctctgatcatagagccagtcacgtcacgtgatgccggcatctacacatgtatagctaccaaccgagcaggacagaactcattcagcctggagcttgtggttgctgctaaagaagcacacaaaccccctgtgtttattgagaagctccaaaacacaggagttgctgatgggtacccagtgcggctggaatgtcgtgtattgggagtgccaccacctcagatattttggaagaaagaaaatgaatcactcactcacagcactgaccgagtgagcatgcaccaggacaaccacggctacatctgcctgctcattcagggagccacaaaagaagatgctgggtggtatactgtgtcagccaagaatgaagcagggattgtgtcctgtactgccaggctggacgtttacacccagtggcatcagcagtcacagagcaccaagccaaaaaaagtacggccctcagccagtcgctatgcagcactttcggaccagggactagacatcaaagcagcgttccaacctgaggccaacccatctnacctgacactgaatactgccttggtagaaagtgaggacctgtaatccagcattcttgktaaagctgaaacacttgaaacagscattgscttgaccaacatattcctttgtcacattatgtnaaaggcagaamcatacctttgctattagaaattaaaaaaacaccaaaatatattttctacttgaataccaacttagtttaagtagataatgctaatacaaatatacaca

SEQ ID NO: 232 - DNA, 970 bp, Homo sapiens
  misc_feature (936): n equals a,t,g, or c
  misc_feature (960): n equals a,t,g, or c
aattcgggacgagggcagcccgcttgccaatcagagcgcggctgagcggccccgcagccaacccccgaggagcggccggctggcgtccgccgcgcccaggagttggggatgtcctacaaacccatcgcccctgctcccagcagcacccctggctccagcacccctgggccgggcaccccggtccctacaggaagcgtcccgtcgccgtcgggctcagtgccaggagccggcgctcctttcagaccgctgtttaacgactttggaccgccttccatgggctacgtgcaggcgatgaagccacccggcgcccagggctcccagagcacctacacggacctgctgtcagtcatagaggagatgggcaaagagatccggcctacctatgctggcagcaagagcgccatggagcgcytgaagagaggaagcgcctcggcctcagcgtctggacctatccggccactgcagagcacccgcttctccctggccttcatcccgagttgcactaaccatcctgggcttcctgtcctgtgtcccttggtgggtcccctccaggaaccaaggagtggccctccaggtggcagcactaaggacacccccccacaacaagagttagcagcgaggtccccatgagtcccacccatgacctgccgacagtgttgcccaccggaacttttgtggcccctaccgctcagcccttcccagcacttctcccactttgtcccgagcctccttctcccccagcaggggcacaggcctggcacctccctgccttgtgtcctgagccatagtgactcttttatctgtgtgtcttttgctaaatatgccctttttatattaataaaagatgatttggagttgtgctctcaaaaaaaaaaaaaaaaaaaaaaaaaaaaaaaaaaaaaaaaaagggcggccgctctagaggatccatgcttnacgtacgcgtgcatgcgtacgtcnttgctcttct

SEQ ID NO: 233 - DNA, 967 bp, Homo sapiens
  misc_feature (923): n equals a,t,g, or c
  misc_feature (926): n equals a,t,g, or c
  misc_feature (955): n equals a,t,g, or c
  misc_feature (957): n equals a,t,g, or c
ggcagagcacttcctggccaggaaacctgagcggtgagactcccagctgcctacatcaaggccccaggacatgcagaaccttcctctagaacccgacccaccaccatgaggtcctgcctgtggagatgcaggcacctgagccaaggcgtccagtggtccttgcttctggctgtcctggtcttctttctcttcgccttgccctcttttattaaggagcctcaaacaaagccttccaggcatcaacgcacagagaacattaaagaaaggtctctacagtccctggcaaagcctaagtcccaggcacccacaagggcraggaggacaaccatctatgcagagccagygccagagaacaatgccctcaacacacaaacccagcccaaggcccacaccaccggagacagaggaaaggaggccaaccaggcaccgccggaggagcaggacaaggtgccccacacagcacagagggcagcatggaagagcccagaaaaagagaaaaccatggtgaacacactgtcacccagagggcaagatgcagggatggcctctggcaggacagaggcacaatcatggaagagccaggacacaaagacgacccaaggaaatgggggccagaccaggaagctgacggcctccaggacggtgtcagagaagcaccagggcaaagcggcaaccacagccaagacgstcattyccaaaagtcagcacagaatgctggctyccacaggagcagtgtcaacaaggacgagacagaaaggartkaccacagcagtcatcccacctaaggagaagaaacctcaggccaccccaccccctgcccctttccagagccccacgacgcagagaaaccaaagactgaagggcggcaacttcaaatctgagcctcggtgggattttgaggaaaaatacaagcttcgaaatanganggcttcagacgacttggccttgactctgngnagatcaaaag

SEQ ID NO: 234 - DNA, 2163 bp, Homo sapiens
  misc_feature (1140): n equals a,t,g, or c
  misc_feature (1157): n equals a,t,g, or c
  misc_feature (1158): n equals a,t,g, or c
  misc_feature (1166): n equals a,t,g, or c
gcccgagcctgcgatggctcttccccaccggaggctcagtccgtggctgcgtcaaaggcatcaaggccctgggcaagtatgtggacctcaagcggctgaacacgacaggcgtgacgccggctgcacygccgacctgctggtggggcgcgccatgactttccatggccacggcttccttcgcctggcgctctcgaacgtggcaccgctcactggcaacgtctactccggcttcggcttccacagcgcccaggacagtgccctgctctactaccgggcgtccccggatgggctatgccaggtgtccctgcagcagggccgtgtgagcctacagctcctgaggactgaagtgaaaactcaagcgggcttcgccgatggtgccccccattacgtcgccttctacagcaatgccacgggagtctggctgtatgtcgatgaccagctccagcagatgaagccccaccggggaccaccccccgagctccagccgcagcctgaggggcccccgaggctcctcctgggaggcctgcctgagtctggcaccatttacaacttcagtggctgcatcagcaacgtcttcgtgcagcggctcctgggcccacagcgcgtatttgatctgcagcagaacctgggcagcgtcaatgtgagcacgggctgtgcacccgccctgcaagcccagaccccgggcctggggcctagaggactgcaggccaccgcccggaaggcctcccgccgcagccgtcagcccgcccggcatcctgcctgcatgctgcccccacacctcaggaccacccgagactcctaccagtttgggggttccctgtccagtcacctggagtttgtgggcatcctggcccgacataggaactggcccagtctctccatgcacgtcctcccgcgaagctcccgaggcctcctcctcttcactgcccgtctgaggcccggcagcccctccctggcgctcttcctgagcaatggccacttcgttgcacagatggaaggcctcgggactcggctccgcgcccagagccgccagcgctcccggcctggcgctggcacaaggtctccgtgcgctgggagaagaaccggatcctgctggtgacggacggggcccgggsctggagccaggaggggccgcaccgnagcaccagggggcagannacccccangccccacaccctctttgtgggcggcctcccggcmagcagccacagctccaaacttccggtgaccgtcgggttcagcggctgtgtgaagagactgaggctgcacgggaggcccctgggggcccccacacggatggcaggggtcacaccctgcatcttgggccccctggaggcgggcctgttcttcccaggcagcgggggagttatcactttagacctcccaggagctacactgcctgatgtgggcctggaactggaggtgcggcccctggcagtcaccggactgatcttccacttgggccaggcccggacgcccccctacttgcagttgcaggtgaccgagaagcaagtcctgctgcgggcggatgacggagcaggggagttctccacgtcataacccgcccctcagtgctgtgtgatggccagtggcaccggctagcggtgatgaaaagcgggaatgtgctccggctggaggtggacgcgcagagcaaccacaccgtgggccccttgctggcggctgcagctggtgccccagcccctctgtacctcgggggcctgcctgagcccatggccgtgcagccctggccccccgcctactgcggctgcatgaggaggctggcggtgaaccggtcccccgtcgccatgactcgctctgtggaggtccacggggcagtgggggccagtggctgcccagccgcctaggacacagccaaccccggcccctggtcaggcccctgcagctgcctcacaccgccccttgtgctcgcctcataggtgtctatttggactctaagctctacgggtgacagatcttgtttctgaagatggtttaagttatagcttcttaaacgaaagaataaaatactgcaaaatgtttttatatttggcccttccacccatttttaattgtgagagatttgtcaccaatcatcactggttcctccttaaaaattaaaaagtaacttctgtgtaaaaaaaaaaaaaaaaaaaaaaaaaaaaa

SEQ ID NO: 235 - DNA, 1321 bp, Homo sapiens
  misc_feature (1313): n equals a,t,g, or c
  misc_feature (1320): n equals a,t,g, or c
gcgcgacgccgccacctccggaacaagccatggtggcggcgacggtggcagcggcgtggctgctcctgtgggctgcggcctgcgcgcagcaggagcaggacttctacgacttcaaggcggtcaacatccggggcaaactggtgtcgctggagaagtaccgcggatcggtgtccctggtggtgaatgtggccagcgagtgcggcttcacagaccagcactaccgagccctgcagcagctgcagcgagacctgggcccccaccacttcaacgtgctcgccttcccctgcaaccagtttggccaacaggagcctgacagcaacaaggagattgagagctttgcccgccgcacctacagtgtctcattccccatgtttagcaagattgcagtcaccggtactggtgcccatcctgccttcaagtacctggcccagacttctgggaaggagcccacctggaacttctggaagtacctagtagccccagatggaaaggtggtaggggcttgggacccaactgtgtcagtggaggaggtcagaccccagatcacagcgctcgtgaggaagctcatcctactgaagcgagaagacttataaccaccgcgtctcctcctccaccacctcatcccgcccacctgtgtggggctgaccaatgcaaactcaaatggtgcttcaaagggagagacccactgactctccttcctttactcttatgccattggtcccatcattcttgtgggggaaaaattctagtattttgattatttgaatcttacagcaacaaataggaactcctggccaatgagagctcttgaccagtgaatcaccagccgatacgaacgtcttgccaacaaaaatgtgtggcaaatagaagtatatcaagcaataatctcccacccaaggcttctgtaaactgggaccaatgattacctcatagggctgttgtgaggattaggatgaaatacctgtgaaagtgcctaggcagtgccagccaaataggaggcattcaatgaacattttttgcatataaamcaaaaaataacttgttatcaataaaaacttgcatccaacatgaatttccagccgatgataatccaggccaaaggtttagttgttgttatttcctctgtattattttcttcattacaaaagaaatgcaagttcattgtaacaatccaaacaatacctcacgatataaaataaaaatgaaagtatcctcctcaaaaaaaaaaaaaaaaaaaaaaaaaaaaaaaaaaaaaaaaaaaaaaaaaaaaaaaaaaaaaaaaaaaaaaaaaaaaaaaaaaaaaaaaaaaaaanggggggnc

SEQ ID NO: 236 - DNA, 683 bp, Homo sapiens
tcgacccacgcgtccgagcagctgctgcagggcccatggcggacacccagtacatcctgcccaatgacatcggcgtgtctagcctggactgccgtgaggccttccgcctgctgtcacccacagagcgcctctatgcctaccacctgtcccgtgccgcctggtacggaggcctggctgtgctgcttcagacctcccctgaggccccctacatctatgctctgctcagccgcctcttccgcgcccaggaccccgaccagctgcgccaacatgccctggctgaaggccttaccgaggaggagtatcaggcgttcctggtctatgccgcgggtgtttactccaacatgggcaactacaagtcctttggtgacaccaagtttgttcccaacttgcccaaggaaaagctggaacgggtgatcctagggagtgaggctgctcagcagcacccagaagaagtcaggggcctctggcakacctgcggggagcttatgttctctctggagccaaggcttcgacacctcggactggggaaggagggaatcaccacctatttctctgggaattgtaccatggaagatgccaaattggccmagatttctggactcacagaacctyartgcctacaacaaccggstcttyaaagaagtcsatgggaraaaggaarccctamtacgaaggtgcgggtt

SEQ ID NO: 237 - DNA, 2115 bp, Homo sapiens
  misc_feature (2112): n equals a,t,g, or c
attcccgggtcgacccacgcgtccgggctccggcaaccgctccggcaacgccaaccgctccgctgcgcgcaggctgggctgcaggctctcggctgcagcgctggggtcttgctttgtctcccaggctggtgtgcagtggtgcgaccacggctcacggcagcctcagccacccagatgtaagcgatctggttcccacctcagcctcccgagtagtggatctaggatccggcttccaacatgtggcagctctgggcctccctctgctgcctgctggtgttggccaatgcccggagcaggccctctttccatcccstgtcggatgagctggtcaactatgtcaacaaacggaataccacgtggcaggccgggcacaacttctacaacgtggacatgagctacttgaagaggctatgtggtaccttcctgggtgggcccaagccaccccagagagttatgtttaccgaggacctgaagctgcctgcaagcttcgatgcacgggaacaatggccacagtgtcccaccatcaaagagatcagagaccagggctcctgtggctcctgctgggccttcggggctgtggaagccatctctgaccggatctgcatccacaccaatgcgcacgtcagcgtggaggtgtcggcggaggacctgctcacmtgctgtggcagcatgtgtggggacggctgtaatggtggctatcctgctgaagcttggaacttctggacaagaaaaggcctggtttctggtggcctctatgaatcccatgtagggtgcagaccgtactccatccctccctgtgagcaccacgtcaacggctcccggcccccatgcacgggggagggagatacccccaagtgtagcaagatctgtgagcctggctacagcccgacctacaaacaggacaagcactacggatacaattcctacagcgtctccaatagcgagaaggacatcatggccgagatctacaaaaacggccccgtggagggagctttctctgtgtattcggacttcctgctctacaagtcaggagtgtaccaacacgtcaccggagagatgatgggtggccatgccatccgcatcctgggctggggagtggagaatggcacaccctactggctggttgccaactcctggaacactgactggggtgacaatggcttctttaaaatactcagaggacaggatcactgtggaatcgaatcagaagtggtggctggaattccacgcaccgatcagtactgggaaaagatctaatctgccgtgggcctgtcgtgccagtcctgggggcgagatcggggtagaaatgcattttattctttaagttcacgtaagatacaagtttcagrcagggtctgaaggactggattggccaaacatcagacctgtcttccaaggagaccaagtcctggctacatcccagcctgtggttacagtgcagacaggccatgtgagccaccgctgccagcacagagcgtccttccccctgtagactagtgccgtagggagtacctgctgccccagctgactgtggccccctccgtgatccatccatctccagggagcaagacagagacgcaggaatggaaagcggagttcctaacaggatgaaagttcccccatcagttcccccagtacctccaagcaagtagctttccacatttgtcacagaaatcagaggagagatggtgttgggagccctttggagaacgccagtctcccaggccccctgcatctatcgagtttgcaatgtcacaacctctctgatcttgtgctcagcatgattctttaatagaagttttattttttcgtgcactctgctaatcatgtgggtgagccagtggaacagcgggagacctgtgctagttttacagattgcctcctaatgacgcggctcaaaaggaaaccaagtggtcaggagttgtttctgacccactgatctctactaccacaaggaaaatagtttaggagaaaccagcttttactgtttttgaaaaattacagcttcaccctgtcaagttaacaaggaatgcctgtgccaataaaaggtttctccaacttgaaaaaaaaaaaaaaaaaaaaamwmggggggggcccgtacccattggcctntgg

SEQ ID NO: 238 - DNA, 1642 bp, Homo sapiens
  misc_feature (1633): n equals a,t,g, or c
  misc_feature (1638): n equals a,t,g, or c
taagcaggcactagaggacctggagcgcacatcaggccgtggcaccctgatgtcgccaccatgctcaacatccttgctttggtgtatcgtgaccagaataagtataaggaagctgcccacctgctgaatgatgcccttagcatccgggagagcaccttgggacctgaccatcctgctgtggctgccacactcaacaatttggctgtgctctatggcaaaaggggcaagtacaaggaggcagagcctctgtgccagcgggcactggagattcgagaaaaggtcctgggcacgaatcatccagatgtggcaaaacagctgaacaacctggccctcttgtgccaaaaccagggcaagtatgaggccgtggaacgctactaccagcgagcactggccatctacgaggggcagctggggccggacaaccctaatgtagcccggaccaagaacaacctggcttcctgttacctgaaacagggcaaatatgctgaggctgagacactatacaaagagatcctgacccgtgcccatgtacaggagtttgggtctgtggatgatgaccacaagcccatctggatgcatgcagaggagcgggaggaaatgagcaaaagccggcaccatgagggtgggacaccctatgctgagtatggaggctggtacaaggcctgcaaagtgagcagccccacagtgaacactactctgagaaacctgggagctctgtataggcgccagggaaagctggaggctgctgagaccctggaggaatgtgccctgcggtcccggagacagggcactgaccctatcagccagacgaaggtggcagagctgcttggggagagtgatggtagaaggacctcccaggagggccctggagacagtgtgaaattcgagggaggtgaagatgcttctgtggctgtggagtggtccggggatggcagtgggaccctgcagaggagtggctctcttggcaagatccgggatgtgctccgcagaagcagtgaactcttggtgaggaagctccargggactgagcctcggccctccagcagcaacatgaagcgagcagcctccttgaactatctgaaccaacctagtgcagcacccctccaggtctcccggggcctcagtgccagcaccatggacctctcttcaagcagctgacattcaacccggcccccaggtctgctgggtccccccacccccacagccctcacagcattccccattgctcctggctcttccccacccctaggtgggacagtgaaggggagcagtttaaccagaagattgctgctgcccttagggtctcagctccctcctcaggaatccctcttaggaaggaccctcaggacaccctctctgcaccctgtggtcctctagagtagctagctctgaggccccaaggtgggtacaaagcaggtatggccctcagagatgcagcctgctgctggcttttcagtcagagggttgggggctggccagccaagctgccttgccctggccgctcttactccctccctctgctgtctcacttcaggtccatgtatttcacttttcttaaataaaagaatcaggtaaccttaaaaaaaaaaaaaaaaaaaaacttggggggggccccgaacccaatttgccccanagggnggcg

SEQ ID NO: 239 - DNA, 468 bp, Homo sapiens
  misc_feature (461): n equals a,t,g, or c
gcggacgcgtgggcctggtctcagtatggcgctgtcctgggttcttacagtcctgagcctcctacctctgctggaagccagatcccattgtgtgccaacctagtaccggtgcccatcaccaacgccaccctggaccggatcactggcaagtggttttatatcgcatcggcctttcgaaacgaggagtacaataagtcggttcaggagatccaagcaaccttcttttactttacccccaacaagacagaggacacgatctttctcagagagtaccagacccgccagaaccagtgcttctataactccagttacctgaatgtccagcgggagaatgggaccgtctccagatacgagggaggccgagaaacatgttgctcacctgctgttccttagggacaccaagaccttgatgtttggttyctacctggacgatgagaagaactgggggtgtctttctatgntgacaag

SEQ ID NO: 240 - DNA, 1329 bp, Homo sapiens
tacatcttataaaacctaactggcatttaaaaaatactgtggccgggcgtggtggctcatgcctgtaatcccagcactttgggaggccgaggtgggaggattgcttgagtccaggaatttgagaccagcctggacaacacagtgagacctcatctctatcaaaaaataaaaattagctagatgtggtggcatgagcctgtgttcccagctgcttaggaggctgaagcaggaggattgattgagcctgcgaggccaaggctgcagcaggctgtgattgcaccactgcacttcagcttgggcaacagagcaagaccctgtctccgaaacaaataaaaaatactgtaataaaagtacttataaacatactaatcctctttcaggaccctaaagttgcaggttagtaggtcttcaaggacaaatctgtaagtttcttatttctgtagtgcaagtaaaatttcactttttgaaactatagagagatccctttctgattagcctacagaacttaaagtgagggaaccatttcctctcacagacaaagaggcctgggatattaggactttggggtttgagagcatcatggggcagacagatggtggatggtctggacaagaagcgagtaagccactgcggttggtcatactgaagggaattgatggcaagaggatcccctgagcaagtcagaagttactctcatcagtcgttcatggtcacaacctgaggtactctgctgagtgggcaaggctgaagaagaggcctgtggaatgcagcattacctgctggacagagcagggcaggcagttctatgccttggagctcctgactgcagggactctgtccccacactcaraaagactcagctcactcaatgagagaatgtgatttactttatagaacgtataatcaactttgttgaataatttgttctattaaggctgtctaaagtatgtgatgtcttcatcatagtatgaagtgttgaaaattaataacgagcctagtttaggaaaaagctgcttaaaactgtggctctaagagagtaatcataaaataccttagataaaattgcactatggaattttcattgagtatgtttaaattattggcttgtctactaatacacatctgcttcaaaatgaacatatttcataaaattggcatcaattttaatgacgctcctggtatggaacctcagatataccctattggagacaatcctttgatcataaattctccccaactataaatcattttatgtctttatcawaaaaaaaaaaaggaattcgatatcaagcttatcgataccgtcgacctcgagggggggcccgtacc

SEQ ID NO: 241 - DNA, 1652 bp, Homo sapiens
gagcayttcggcaactggcaaaaattaggtgtacagggatctaggtaatactgtttatttgagcaataatatattgtgctaacgttcaggcatcctattactgagaaataagggaaaatgagtgtaaagtacaactaagagtctcggctacagggaaaaataccatcagttaaatatccatagtcctagagcatttatgtaaaactgcaatttgaatcctgcaatacattttggctttttcctcagtgataccatgtgtgggaagttgttctgtcaaggtgggtcggataatttgccctggaaaggacggatagtgactttcctgacatgtaraacatttgatcctgaagacacaagtcaagaaatargcatggtggccaatggaactaagtgtggcgataacaaggtttgcatkaatgcagaatgtgtggatattgagaaagcctacaaatcaaccaattgctcatctaagtgcaaaggacatgctgtgtgtgaccatgagctccagtgtcaatgtgaggaaggatggatccctcccgactgcgatgaytcctcagtggtcttccacttctccattgtggttggggtgctgttcccaatggcggtcatttttgtggtggttgctatggtaatccggcaccagagctccagagaaaagcagaagaaagatcagaggccaytatctaccactggcaccaggccacacaaacagaagaggaaaccccagatggtaaaggctgttcaaccccaagagatgagtcagatgaagccccatgtgtatgatctgccagtagaaggcaatgagcccccagcctcttttcataaagacacaaacgcacttccccctactgttttcaaggataatccaatgtctacacctaaggactcaaatccaaaagcatgaagcaacagctaagcaagaactaatggctaaattatcaacttggaaaactggaaaatctggatggcagagaaatatactatctcaccagtatttgctctcgactcaagaaggttaacattttctgattcatgttagactttgaagagactaaagaaaattttcaagaggaacatatgcctgagaacctttgcatgaatttaaaatttcaattatccattcttataagaaggaagatgattgtaaagaaatatctccgaagttaaaatctgtaataggaattgattcattctctaatgaaaacaaaacataaaaacatcacactaatcttggaggaataagaaaaattgtacatccattaaatgtacaattgattgcaacatcttgattgttttaaccattaacttgtcaaattacaatcacagttaagaaaatgatgtaaaattctgttttgtggatctctttcctagattagcttctgaaatcattattagctatatcatttgaggttttctacaatttggtataactaagaatttaaaaatgttttatcatatatatttgtataattaattactggcatggttaaagtggttttcactttttaaatggagaaaatttcagttaaattaataggataaaccaggttgcgaactggtgacctgtaggccatgtttgcactgcaaatatatttggtctgaatgatattgaaaaaaaaaaaaaaaaaaactcgagggggggcccgtaccca

SEQ ID NO: 242 - DNA, 1946 bp, Homo sapiens
  misc_feature (84): n equals a,t,g, or c
  misc_feature (538): n equals a,t,g, or c
  misc_feature (1932): n equals a,t,g, or c
  misc_feature (1941): n equals a,t,g, or c
ggcacgagtacaaggtggcggcgctgggmctggccaccggcwtcgtcttggtgctgctgctgctctgcctctaccgcgtgctangcccgcgcaactacgggcagctgggtggtgggcccgggcggcggaggcgcggggagctgccctgcgacgactacggctatgcgccacccgagacggagatcgtgccgcttgtgctgcgcggccacctcatggacatcgagtgcctggccagcgacggcatgctgctggtgagctgctgcctggcaggccacatctgcgtgtgggacgcgcagaccggggattgcctaacgcgcattccgcgcccaggcaggcagcgccgggacagtggcgtgggcagcgggcttgaggctcaggagagctgggaacgactttcagatggtgggaaggctggtccagaggagcctggggacagccctcccctgagacaccgcccccggggccctccgccgccttccctcttcggggaccagcctgacctcacctgcttaattgacaccaacttttcagcgcagcntcggtcctcacagcccactcagcccgagccccggcaccgggcggtctgtggccgctctcgggactccccaggctatgacttcagctgcctggtgcagcgggtgtaccaggaggaggggctggcggccgtctgcacaccagccctgcgcccaccctcgcctgggccggtgctgtcccaggcccctgaggacgagggtggctcccccgagaaaggctccccttccctcgcctgggcccccagtgccgagggttccatctggagcttggagctgcagggcaacctcatcgtggtggggcggagcagcggccggctggaggtgtgggacgccattgaaggggtgctgtgctgcagcagcgaggaggtctcctcaggcattaccgctctggtgttcttggacaaaaggattgtggctgcacggctcaacggttcccttgatttcttctccttggagacccacactgccctcagccccctgcagtttagagggaccccagggcggggcagttcccctgcctctccagtgtacagcagcagcgacacagtggcctgtcacctgacccacacagtgccctgtgcacaccaaaaacccatcacagccctgaaagccgctgctgggcgcttggtgactgggagccaagaccacacactgagagtgttccgtctggaggactcgtgctgcctcttcacccttcagggccactcaggggccatcacgaccgtgtacattgaccagaccatggtgctggccagtggaggacaagatggggccatctgcctgtgggatgtactgactggcagccgggtcagccatgtgtttgctcaccgtggggatgtcacctcccttacctgtaccacctcctgtgtcatcagcagtggcctggatgacctcatcagcatctgggaccgcagcacaggcatcaagttctactccattcagcaggacctgggctgtggtgcaagcttgggtgtcatctcagacaacctgctggtgactggcggccagggctgtgtctccttttgggacctaaactacggggacctgttacagacagtctacctggggaagaacagtgaggcccagcctgcccgccagatcctggtgctggacaacgctgccattgtctgcaactttggcagtgagctcagcctggtgtatgtgccctctgtgctggagaagctggactgagcgcagggcctccttgcccaggcaggaggctggggtgctgtgtgggggccaatgcactgaacctggacttgggggaaagagccgagtatcttccagccgctgcctcctgactgtaataatattaaacttttttaaaaaaccataaaaaaaaaaaaaaaaaaaaaaaaaaaaaaaaaaaaaaaaaaaaaaaaaaaaaaaaaaaaaaaanaaaaaaaanggggg

SEQ ID NO: 243 - DNA, 518 bp, Homo sapiens
  misc_feature (298): n equals a,t,g, or c
  misc_feature (472): n equals a,t,g, or c
  misc_feature (494): n equals a,t,g, or c
  misc_feature (500): n equals a,t,g, or c
  misc_feature (507): n equals a,t,g, or c
  misc_feature (513): n equals a,t,g, or c
ggacgcgtgggcagctgcagaaatccaaaaatattgaccttataagctcaagatgctgtatgctgggtttttacaaggatattcggtatttgatgaaacccagttaggcatgacatattccccttctccccattcctacctctcttttattaaaaattttatagttacagtgtctatgttgcccagcctggtcttgaaccctttggctcaagtgatccacctgccttggcctcccaaagtgctgggattacagatgggagccatcgtgtctggcccattcctgcctcttaaagccctncacccaacaggcagacttgagactcaaaccgtggtcccagctcttgcatcaggggtagtttgggaattcaaaatctttcaaactggggtaaaaaccaggcccagaattcagagttcaaccaacaagctttccaagaatgccggcccaaaggaaaaaagtgggttcttggaaaanccggggaaaaggggggtgcaancctttngggagtnacaagngcttg

SEQ ID NO: 244 - DNA, 621 bp, Homo sapiens
  misc_feature (460): n equals a,t,g, or c
  misc_feature (569): n equals a,t,g, or c
  misc_feature (593): n equals a,t,g, or c
  misc_feature (609): n equals a,t,g, or c
  misc_feature (612): n equals a,t,g, or c
  misc_feature (621): n equals a,t,g, or c
gggaaggtccatgggttgatacctcaggtcaaaaatgtgtttactctgttgattgctgtttcactttacttgtatatcagatatataagctatgaacacaagtttgtagtaaaagtatcttctgtctgggcaatggctcacacctgtaattccaacactttggggggctcaggtgggaggatttctagtccccaggagtttgagaccagcctgggcaataaactagaccccatgtctctaaaaaatgtaaaaaacatcaagaggctgagtcaggaggatcatttgagcttaggagttcaaggctgcagtaagttatgattgtgccactgcattccagcctgggtgacaagagtgagaccctgacccaaaaaaagtatcttctgataaagtggcatttgaaaattgcagaaaattttaatattttttcttttaatattaagaactttattgatctctctangacaccttggtgaggaaattaatggcacttttcttgacattcaacctgggactttgggtgattctgggttctggtgaatttaaagtttcaacatttctttggggcaccntttacaaggggtttggcccttggnaccttatgaccggtcnaanggtccaaan

SEQ ID NO: 245 - DNA, 480 bp, Homo sapiens
  misc_feature (340): n equals a,t,g, or c
  misc_feature (366): n equals a,t,g, or c
  misc_feature (431): n equals a,t,g, or c
  misc_feature (447): n equals a,t,g, or c
  misc_feature (458): n equals a,t,g, or c
  misc_feature (460): n equals a,t,g, or c
  misc_feature (469): n equals a,t,g, or c
ggcacgaggtgaaaccctgtctctactaaaaatacaaaaattagctgggtgtggtggtgggcgcctgtagtcccagctactcgggaggctgaggcgggagtatgacttgaacctgggaggcggaggttgcagtgagctgagattgtgccactgcactccagcctgggtgacagagcaagactccgtttcagaaaaaaaaaaaaactgtgtctcatcattgcactgttcttttaaaattgtatatatatatttttcttgcagatacactctggaaatgattaaactagtaccacataatgaaagtgcatggaactatttgaaagggattttgcaggatcgnggtctttccaaatatcccaatctgtnaaatcaattaccttgatttacaaccaagtcaaagttccccctacctaattgcctttcttgggganaccatgaagacatgcnagaaaaccagngngacaataanggagacatcct

SEQ ID NO: 246 - DNA, 451 bp, Homo sapiens
  misc_feature (102): n equals a,t,g, or c
  misc_feature (107): n equals a,t,g, or c
  misc_feature (110): n equals a,t,g, or c
  misc_feature (135): n equals a,t,g, or c
  misc_feature (198): n equals a,t,g, or c
  misc_feature (287): n equals a,t,g, or c
  misc_feature (309): n equals a,t,g, or c
  misc_feature (314): n equals a,t,g, or c
  misc_feature (319): n equals a,t,g, or c
  misc_feature (324): n equals a,t,g, or c
  misc_feature (328): n equals a,t,g, or c
  misc_feature (330): n equals a,t,g, or c
  misc_feature (332): n equals a,t,g, or c
  misc_feature (342): n equals a,t,g, or c
  misc_feature (349): n equals a,t,g, or c
  misc_feature (379): n equals a,t,g, or c
  misc_feature (434): n equals a,t,g, or c
  misc_feature (438): n equals a,t,g, or c
  misc_feature (439): n equals a,t,g, or c
  misc_feature (451): n equals a,t,g, or c
aggcgacccaccaccatgccccggctaaatttagttgtatttttagtagagatggggtttcaccgtattagccaggatggtctcgatctcctgacctcgtgntccgngcncctcggcctcccaaagtgctggganttacaggcgtgagccaccgtgcccggcctgattctcttaaaattgaagaggtgctgccaaggncttcagatctaacgcagatgcatagaccttgttcatggtacttgttcagcctgtgctggggagccgtggttccgagtttcctgggaggntgacagggtgaagccaccgtanccacnacccnccganttcncntncgctttcttntcagcantaggattaaagggattttgaatgaagcaanttttaaggggtaggaggtgttggggaaaataaataattattcaagtaaggccttngggnntttagggggttn

SEQ ID NO: 247 - DNA, 530 bp, Homo sapiens
  misc_feature (7): n equals a,t,g, or c
  misc_feature (8): n equals a,t,g, or c
  misc_feature (13): n equals a,t,g, or c
  misc_feature (29): n equals a,t,g, or c
  misc_feature (40): n equals a,t,g, or c
  misc_feature (404): n equals a,t,g, or c
aggaaannagtanctgacagtaacggtcngaattcccggntcgacccacgcgtccgctggaacttctcctggtctctcagctggggccactgtcggcatcatgattggagtgctggttggggttgctctgatatagcagccctggtgtagtttcttcatttcaggaagactgacagttgttttgcttcttccttaaagcatttgcaacagctacagtctaaaattgcttctttaccaaggatatttacagaaaagactctgaccagagatcgagaccatcctagccaacatcgtgaaaccccatctctactaaaaatacaaaaatgagctgggcttggtggcgcacacctgtagtcccagttactcggggaagctgaggcaggagaatcgcttgaacccgggantggagattgcagtgagcccagatcgcaccactgcactccagtctggccaacagagcaagactccatctcaaaaaagaaaagaaaaggagactctgacctggtactcttgaatacaagtttctgata

SEQ ID NO: 248 - DNA, 635 bp, Homo sapiens
  misc_feature (217): n equals a,t,g, or c
  misc_feature (224): n equals a,t,g, or c
  misc_feature (235): n equals a,t,g, or c
  misc_feature (408): n equals a,t,g, or c
  misc_feature (437): n equals a,t,g, or c
  misc_feature (484): n equals a,t,g, or c
  misc_feature (513): n equals a,t,g, or c
  misc_feature (516): n equals a,t,g, or c
  misc_feature (560): n equals a,t,g, or c
  misc_feature (568): n equals a,t,g, or c
  misc_feature (576): n equals a,t,g, or c
  misc_feature (603): n equals a,t,g, or c
  misc_feature (635): n equals a,t,g, or c
ggtggcaggtgcttataatcccagctactctgggggccaaggcaggagaattgcttgagcctgggagatggaggttgcagtgagctgagatcatgccactgcactccagcctgggcaacagagcaagactctgcctcaaaaaaaaattaaaataaatttaaatacaaaaaaaaatagccaggtgtggggtgcatgcctggaatcccagctacttganaaggctnaaggcaccaanaattgcttgaacccaggaggtggaggttgcagtgagccaagatcacaggagccactgcactccagcctgggtgacagagtgagactctgtctcaaaaaaaaaattaaataaattattataacctttcaaaaatgctgtgtgcattttcatgttcttttttttaacattactgncactctccctaatgaaatggacttcaaanaagcagtattttgttaaataaatacataacctcattctgaataatgnccctcattttgactataactgggcttggnttnaaaagcaaaatttaacaaaaatttaatccccttccaaaggaacnttgggtancctgggtnaaaaaatgccaaatggggtacttttanttaaaatttggaatttaacatcttttttggan

SEQ ID NO: 249 - DNA, 360 bp, Homo sapiens
  misc_feature (118): n equals a,t,g, or c
  misc_feature (280): n equals a,t,g, or c
  misc_feature (282): n equals a,t,g, or c
  misc_feature (305): n equals a,t,g, or c
  misc_feature (360): n equals a,t,g, or c
ctcaggaaaccatgtccaaaaccctagcagcggtacagcatgctgtctccaacccttatccccaggtttaagggtggtttatggccatacgtggaggttttttgttgttgtttttganactgagtttcactcttgttgcccaggctggagtgcaatggcaccatctcggctcactgcaacctccacctcctggttcaagcgatctcaggcctcagcttcccaagtagttgggattacaggcgcctgccaccacacctggctaattttgtatttttagtananatggggttctccatgttggtcangctggtctcaaactcccgaactcaagtgatctgcccgccttgggctcccaaaatn

SEQ ID NO: 250 - DNA, 464 bp, Homo sapiens
  misc_feature (397): n equals a,t,g, or c
  misc_feature (436): n equals a,t,g, or c
  misc_feature (446): n equals a,t,g, or c
  misc_feature (459): n equals a,t,g, or c
  misc_feature (460): n equals a,t,g, or c
gctgtgaggaaggggaatcgcttgaacccgggaggcggaggttgcggtgagccgagatagcgccattgcactccagcctgggcaacaagagcgaaaccctgtctcaaaaaaaaaacaaaaaaccccacaaaaactaggagcctggaaggccggactgggtctccgtgggaggggcctgggtctggagagcagggcagggtctcctgggcctaggggatggggatggggctgggtctcagaggaggcagggtttacgtgcagaagagcggacttggtctccggggtcccgagtgggtgacgcggcccgccacaggtgcttcctgaaggtgagccggctggaggcacaactgctcctggagcgctaccccgagtgcgggaacctgctgctgcggcccancggggacggcgccgacggcgtgtcggtcaccactcggcngatgccaacnggaacgcacgtgnnccgg

SEQ ID NO: 251 - DNA, 315 bp, Homo sapiens
  misc_feature (24): n equals a,t,g, or c
  misc_feature (28): n equals a,t,g, or c
  misc_feature (37): n equals a,t,g, or c
  misc_feature (77): n equals a,t,g, or c
  misc_feature (113): n equals a,t,g, or c
  misc_feature (202): n equals a,t,g, or c
  misc_feature (210): n equals a,t,g, or c
  misc_feature (220): n equals a,t,g, or c
  misc_feature (265): n equals a,t,g, or c
  misc_feature (302): n equals a,t,g, or c
  misc_feature (305): n equals a,t,g, or c
  misc_feature (311): n equals a,t,g, or c
aaagtaaacatcggggaaggtttncggnaacgctccnaggtaccggtccggaattcccgggtcgacccacgcgtttngctccttgttcaggctggtctggaactggcgacttngggtgatccgcccgcctcggcctcccaaagtggtgggattacaggtgtgagccaccgtgcccagccctgaaatagtcttaattgcttgnttttcttntttgtctgangtgtgctttttaaaatctctatggagatggagaagactgacattntctggcctgatgtgaaaaacctctcattaaaaaccgngtntgtagntttg

SEQ ID NO: 252 - DNA, 333 bp, Homo sapiens
  misc_feature (51): n equals a,t,g, or c
  misc_feature (79): n equals a,t,g, or c
  misc_feature (141): n equals a,t,g, or c
  misc_feature (196): n equals a,t,g, or c
  misc_feature (200): n equals a,t,g, or c
  misc_feature (233): n equals a,t,g, or c
  misc_feature (253): n equals a,t,g, or c
  misc_feature (254): n equals a,t,g, or c
  misc_feature (302): n equals a,t,g, or c
  misc_feature (303): n equals a,t,g, or c
  misc_feature (325): n equals a,t,g, or c
gggctaatttgtgtatttttagtggaaacggggttttgccacgttggccangctggtctcgaactcctgacctcaggtnatccacccaccccagcctcccaaagtgctgggattacaggcgtgagccactgagcccagccnacttttcagtttttaacataatttttgttttatccacaacttttcaagtattganagtncaataaaaaacatgggttcttagtctgtaactntctgttaaagcctatgaatnncttctgaaaatcatgtttttaaatgcataaaatatatacgattacganngaatcttattattgtcgaaatncagttatt

SEQ ID NO: 253 - DNA, 307 bp, Homo sapiens
  misc_feature (7): n equals a,t,g, or c
  misc_feature (42): n equals a,t,g, or c
  misc_feature (48): n equals a,t,g, or c
  misc_feature (250): n equals a,t,g, or c
  misc_feature (260): n equals a,t,g, or c
  misc_feature (281): n equals a,t,g, or c
  misc_feature (299): n equals a,t,g, or c
  misc_feature (302): n equals a,t,g, or c
gaaaaanttttaaaggaagaagggaaggcaggctggggaggntggggnaaggaagcagggagtgcagatcactccccttccatgagttgttttcttaagatgctagaacttggccaggcatggtggctcacccctgtaatcccagcactttgggaggctgaggctggcagatcacttgaggtcaggagttccagaccagcctggccaacatggtgaaaccccatctctactaataatacaaaatttagcngggtgtgggnggtgtgcacctgtggccctanctacttgggaaggctganacnaggag

SEQ ID NO: 254 - DNA, 401 bp, Homo sapiens
  misc_feature (256): n equals a,t,g, or c
  misc_feature (340): n equals a,t,g, or c
  misc_feature (350): n equals a,t,g, or c
  misc_feature (359): n equals a,t,g, or c
  misc_feature (378): n equals a,t,g, or c
  misc_feature (379): n equals a,t,g, or c
gtataaatgttacttaaaaaaaatatatttggccgagcacagtggctcacgcctgtaatccccacactttgggaggccgaggcgggcagattgcctgaggtcaggaatttgagatcagcctggccaacatgatgaaaccccgtctctactaaaaatacaaaaattagccgggcatggtggcaggcacctgtaatcccggctactcgggaggctgaggcaggaaaatcgcttgaacccgggagtcggaagttgcagngagccaaggtcatgtcatcattgcactccagcttgggcaacaagagtgaagacttcgtctcaaaaaaaaaacttacagactttnttttcctttngtaaattgntagtttaactttgaattcnngatgaaggatttattcttatct

SEQ ID NO: 255 - DNA, 406 bp, Homo sapiens
  misc_feature (149): n equals a,t,g, or c
  misc_feature (243): n equals a,t,g, or c
  misc_feature (369): n equals a,t,g, or c
  misc_feature (370): n equals a,t,g, or c
  misc_feature (376): n equals a,t,g, or c
  misc_feature (390): n equals a,t,g, or c
  misc_feature (392): n equals a,t,g, or c
gcttatcatttgtattaaaatatggtttaatgtaaagagttgcctttctccattcccccctcccctcccctcccctcctctcccctcctctcttacccccaattaaaaaatagcacatccctaatgtgggaaacagtaagaaagcatanattacattttaggcagggcacagtggctcacgcctgtaatcccagcactttcggaggctgaggtgggtggatcacttgaggtcaggagtttganaccagcctggccaacatggtgaaaccctgtctctactaaaagtacaaaaattagccaggcatggaggcgggtgcctgtaatcccagctacttgggaggctgaggcaggagaattgcttgagcccannaggcanaggttgcagtgagnanagatcgggccattg

SEQ ID NO: 256 - DNA, 415 bp, Homo sapiens
  misc_feature (27): n equals a,t,g, or c
  misc_feature (324): n equals a,t,g, or c
  misc_feature (378): n equals a,t,g, or c
  misc_feature (379): n equals a,t,g, or c
  misc_feature (411): n equals a,t,g, or c
  misc_feature (412): n equals a,t,g, or c
gacatgaattccttaatgatgggagangataaaatcaagttcaaacacatcacccccctgcaggagcagagcaaagaggtggccatccgcatctttcagggctgccagtttcgctccgtggaggctgtgcaggagatcacagagtatgccaaaagcattcctggttttgtaaatcttgacttgaacgaccaagtaactctcctcaaatatggagtccacgagatcatttacacaatgctggcctccttgatgaataaagatggggttctcatatccgaggggccaagcttcatgacaagggagtttctaaagagcctgcgaaancttttggtgactttatgggagcccagtttgagtttgccgtgaaattccatggcnngggattatatggacagcggcttgggcaaattnnagc

SEQ ID NO: 257 - DNA, 414 bp, Homo sapiens
  misc_feature (102): n equals a,t,g, or c
  misc_feature (297): n equals a,t,g, or c
  misc_feature (375): n equals a,t,g, or c
  misc_feature (380): n equals a,t,g, or c
  misc_feature (384): n equals a,t,g, or c
  misc_feature (397): n equals a,t,g, or c
  misc_feature (411): n equals a,t,g, or c
cgcagaggaaaccccgcacccctggcagaagttccggaccaagccccagggggaccaggacaccggcaaggaggctgatgacggatgtgcccttgggggcangtgatgggagcacagctggaacaatgtgctcggcccccagtgctctgtgggagccccaggacaagtgagctggtgtcacctcctgcctgggggaagagccaggccctgaagaacagccgcagcgtgtcacaggtgttggtgaggacacacactaggcccaaggtgcctgtgctcccagcaggttccaagtgcaanttcaagccaactttgcgtgttaacttcaacggggacttccaagcttccaagctaacttttgtggtgttaaccttcaanaaaancaanaaaggggggcttnggggcattttggtncct

SEQ ID NO: 258 - DNA, 373 bp, Homo sapiens
  misc_feature (321): n equals a,t,g, or c
  misc_feature (324): n equals a,t,g, or c
  misc_feature (328): n equals a,t,g, or c
  misc_feature (351): n equals a,t,g, or c
  misc_feature (361): n equals a,t,g, or c
ctccgagtcagggcccaggtgcagctctccggtggacacagaatgcagccatgctgagggcagccggagccaaggccctgagaaagccttcagcccggcttctccatgtgcctggaacgtgtgtgtcaccaggaaggcccccctgctggcctctgacagtagctcctctgggggctcccacagcgaggatggcgaccagaaggcagcgagtgccatggatgcggtgagcaggggtcccggccgggaggccccccgctgcccacagtggccaagacagaagaagcttttggcaaggttcggttttctgacaaccggcttttnaancctnccttgcccccgcgccaaaagganttaatttctngcccaagcgttg

SEQ ID NO: 259 - DNA, 529 bp, Homo sapiens
  misc_feature (287): n equals a,t,g, or c
  misc_feature (377): n equals a,t,g, or c
  misc_feature (438): n equals a,t,g, or c
  misc_feature (443): n equals a,t,g, or c
  misc_feature (444): n equals a,t,g, or c
  misc_feature (495): n equals a,t,g, or c
aaactaacagatgaagaagtagatgaaatgatcagagaagcagatattgatggagacggacaagtcaactatgaagaattcgtacagaatgatgactgcaaaatgaagacctactttcaactcctttttcccccctcttagaaagaatcaaatttgaatcttttacttacctccttgcaaaaaaaagaaaaaagaaaaaattccatttattcatccttgtttcctatatagccaaactgaatgttcaaaagtaccttccttgtcccacacacacaaatctgcatgtntggttgggggggtccctgtccccctaaagatcaagctacacttcccatttttacaatataatacttgttctaccttatgatagatccctnaaaagtttcccctttgctaatgattatacctgtttgggtggccagttttccctgcttgcanttgannaatgacccagccggcctttgttttaaattgaaatgaaaacaattccaaccntccatggttcccgtccattgttaattaatggcca

SEQ ID NO: 260 - DNA, 566 bp, Homo sapiens
  misc_feature (361): n equals a,t,g, or c
  misc_feature (413): n equals a,t,g, or c
  misc_feature (437): n equals a,t,g, or c
  misc_feature (460): n equals a,t,g, or c
  misc_feature (473): n equals a,t,g, or c
  misc_feature (509): n equals a,t,g, or c
  misc_feature (562): n equals a,t,g, or c
actgtctgtatattacggaagctcttttcacataatatgactcgtctgcgaaagtttatggtttactttggaaagaaccaaagtttgcagaagatacagaaaactcctctctttgtggcggcgatctgtgctcattggtttcagtatccttttgacccatcctttgatgatgtggctgttttcaagtcctatatggaacgcctttccttaaggaacaaagcgacactgaaaattctcaaagcaactgtgtcctcctgtggtgagctggccttgaaagggtttttttcatgttgctttgagtttaatggatggatggatctcgcagaagcagggggtggatggaagatgaagatctaaccangtgcttggatgagcaaattttacagcccagagactaagaccattctaccggntttttaagttccggccttccaagnaattcttggcgggggatgaggcnggattgaactccngggatccagataggcaggaacatcaagattgggganggtaaccattggaacaaaccactcacccaggtgacggtaagcgcctacaacantttt

SEQ ID NO: 261 - DNA, 502 bp, Homo sapiens
  misc_feature (14): n equals a,t,g, or c
  misc_feature (25): n equals a,t,g, or c
  misc_feature (44): n equals a,t,g, or c
  misc_feature (47): n equals a,t,g, or c
  misc_feature (61): n equals a,t,g, or c
  misc_feature (72): n equals a,t,g, or c
  misc_feature (75): n equals a,t,g, or c
  misc_feature (89): n equals a,t,g, or c
  misc_feature (98): n equals a,t,g, or c
  misc_feature (126): n equals a,t,g, or c
  misc_feature (146): n equals a,t,g, or c
  misc_feature (149): n equals a,t,g, or c
  misc_feature (151): n equals a,t,g, or c
  misc_feature (157): n equals a,t,g, or c
  misc_feature (169): n equals a,t,g, or c
  misc_feature (176): n equals a,t,g, or c
  misc_feature (180): n equals a,t,g, or c
  misc_feature (186): n equals a,t,g, or c
  misc_feature (190): n equals a,t,g, or c
  misc_feature (194): n equals a,t,g, or c
  misc_feature (211): n equals a,t,g, or c
  misc_feature (224): n equals a,t,g, or c
  misc_feature (231): n equals a,t,g, or c
  misc_feature (235): n equals a,t,g, or c
  misc_feature (246): n equals a,t,g, or c
  misc_feature (247): n equals a,t,g, or c
  misc_feature (262): n equals a,t,g, or c
  misc_feature (273): n equals a,t,g, or c
  misc_feature (315): n equals a,t,g, or c
  misc_feature (334): n equals a,t,g, or c
  misc_feature (339): n equals a,t,g, or c
  misc_feature (362): n equals a,t,g, or c
  misc_feature (375): n equals a,t,g, or c
  misc_feature (376): n equals a,t,g, or c
  misc_feature (446): n equals a,t,g, or c
  misc_feature (454): n equals a,t,g, or c
  misc_feature (477): n equals a,t,g, or c
  misc_feature (484): n equals a,t,g, or c
  misc_feature (497): n equals a,t,g, or c
ggttaaaagtggantgtatgttgtnatagaagttaaagttgcanctnattatggaataganataacctgtcnaanttatctgatgacanattaccaangtgctcccccatccccacagtatagaangattatttgcatgggtgcanaananaatggnttgccgctggantatcaanagangttaanagcnttanaaccaaatgactatacntgaaaggtctcanaagaaantgangacatcatcannaagggggaaacacanactctttagancataacagaatatatctaagggtattctatgtgctaatatanaatattattaacacttganaacanggatctgggggatctccacgttngatccattttcannagtgctctgagaggagtatcttacttggggtgactccttgtttttagactatactcagaaactgggatanggagttanaccatttaaaacgggtgtatganggcctgnaatatgtgacaantgaat

SEQ ID NO: 262 - DNA, 489 bp, Homo sapiens
  misc_feature (2): n equals a,t,g, or c
  misc_feature (3): n equals a,t,g, or c
  misc_feature (387): n equals a,t,g, or c
  misc_feature (440): n equals a,t,g, or c
  misc_feature (464): n equals a,t,g, or c
  misc_feature (477): n equals a,t,g, or c
  misc_feature (483): n equals a,t,g, or c
  misc_feature (486): n equals a,t,g, or c
gnngacgcgtgggtccgggatgaggagtggggtggccactccccccggagtcccaggggatgggaccaggagcccgccagggagcaggcaggcgggggctggcgggccaggcggccccgggcccgctccgtggacgccctggacgacctcaccccgccgagcaccgccgagtcagggagcaggtctcccacgagtaatggtgggaggagaagccgggcctacatgcccccgcggagccgcagccgggacgacctctatgaccaagacgactcgagggacttcccacgctcccgggacccccactacgacgacttcaggtctcgggagcgccctcctgccgaccccaggtcccaccaccaccgtacccgggaccctcgggacaacggntccaggtccggggacctcccctatgatgggcggctactggaggaggctgtgangaagaaggggtcggacgagaggangagaccccacaangaggangangaa

SEQ ID NO: 263 - DNA, 93 bp, Homo sapiens
  misc_feature (22): n equals a,t,g, or c
  misc_feature (51): n equals a,t,g, or c
  misc_feature (75): n equals a,t,g, or c
  misc_feature (76): n equals a,t,g, or c
  misc_feature (93): n equals a,t,g, or c
gcggctgcccgcctcgcgcgtnttccctgcccgggtctcctcgctgtcgcngccgatgccacaccatggccttcnncaccaggcagttcatgn

SEQ ID NO: 264 - DNA, 389 bp, Homo sapiens
  misc_feature (9): n equals a,t,g, or c
  misc_feature (24): n equals a,t,g, or c
  misc_feature (45): n equals a,t,g, or c
  misc_feature (72): n equals a,t,g, or c
  misc_feature (106): n equals a,t,g, or c
  misc_feature (178): n equals a,t,g, or c
  misc_feature (241): n equals a,t,g, or c
  misc_feature (249): n equals a,t,g, or c
  misc_feature (309): n equals a,t,g, or c
  misc_feature (327): n equals a,t,g, or c
  misc_feature (333): n equals a,t,g, or c
  misc_feature (344): n equals a,t,g, or c
  misc_feature (358): n equals a,t,g, or c
ggcagagtntgctcttgggaagtncaggctcggttgtcttttggnagccatggagagtgactttaatctgcnttactacgtggggcacaagggcaagtccggccangagttcctggagtttgaagtttcgaccggacggagcttgaaatcgtcattggagatgaacacatttcttttnacaacatcaaaaattggttcccttattgatgtcaatcatgccaaggatccagaaggcttacgnagtatttnattatcttgtccaggacctgaagtgtttggtcttcagtcttattgggttacacttcaagnttaaaccatctagactgnatattngtgtgggacangggggtgggtgggngtaggaaattttgtgtattttcaggggcatt

SEQ ID NO: 265 - DNA, 400 bp, Homo sapiens
  misc_feature (296): n equals a,t,g, or c
  misc_feature (308): n equals a,t,g, or c
  misc_feature (342): n equals a,t,g, or c
  misc_feature (343): n equals a,t,g, or c
  misc_feature (389): n equals a,t,g, or c
  misc_feature (390): n equals a,t,g, or c
tttgcccacgcgtccgcccacgcgtccgcccacgcgtccgcccacgcgtccgcacccccatcccagtcccagcctacttccgccacgcagaacctggattctccctcaagaggcccagggggctcagccggagcctcccacctccgccccctgccaagggcagcattcccatcagccgcctcttccctcctcggaccccaggctggcaccagctgcagccccgcgggtgtcattccgggcgaaggcctagagactctgcagagccctgggtatgacccaagccgcaaaagtctttnttcaagcaaagnttcaaaaggttaagccgcttgggcaatggtttannggaaaggttttaagggggcctccaagggaggacggccggttttttnnggaaaagggt

SEQ ID NO: 266 - DNA, 382 bp, Homo sapiens
  misc_feature (10): n equals a,t,g, or c
  misc_feature (42): n equals a,t,g, or c
  misc_feature (44): n equals a,t,g, or c
  misc_feature (49): n equals a,t,g, or c
  misc_feature (88): n equals a,t,g, or c
  misc_feature (103): n equals a,t,g, or c
  misc_feature (109): n equals a,t,g, or c
  misc_feature (162): n equals a,t,g, or c
  misc_feature (166): n equals a,t,g, or c
  misc_feature (185): n equals a,t,g, or c
  misc_feature (186): n equals a,t,g, or c
  misc_feature (220): n equals a,t,g, or c
  misc_feature (248): n equals a,t,g, or c
  misc_feature (278): n equals a,t,g, or c
  misc_feature (301): n equals a,t,g, or c
  misc_feature (326): n equals a,t,g, or c
  misc_feature (341): n equals a,t,g, or c
  misc_feature (350): n equals a,t,g, or c
  misc_feature (362): n equals a,t,g, or c
ggacctggancggaggcgggaagaaagtcatacccagatccnanatccncacgcagaatgcacaggtgagctgccgctgggcccggancatgctgggcgttcncacctngcagactgcacgctccaaccgcccgctccacctactctttccaggcccggcancttntggagaaggaattcagcanncttatctccttaggcacagacaggctgctggacnaggacatgcgccaagtctttcagttcgntccccatcctggcggaagatgttccgggangaaggacctccgaggcgtaactngccgactcactgagatgttgccccncaactttcgttcggntgcagcggnattcctgggctnttccggggctcccttttccc

SEQ ID NO: 267 - DNA, 449 bp, Homo sapiens
  misc_feature (374): n equals a,t,g, or c
  misc_feature (433): n equals a,t,g, or c
  misc_feature (446): n equals a,t,g, or c
  misc_feature (447): n equals a,t,g, or c
  misc_feature (448): n equals a,t,g, or c
gggcgatggctgaaggaccaggagctgagccctcgggagccggtgctgcccccacagaagatggggcctatggagaaattctggaataaatttttggagaataaatccccttggaggaaaatggtccatggggtatacaaaaagagtatctttgttttcactcatgtacttgtacctgtctggattattcattattacatgaagtatcatgtttctgaaaaaccatatggcatagttgaaaagaagtccagaatattccctggtgatacaattctggagactggagaagtaattccaccaatgaaagaatttcctgatcaacatcattaaagattatgtaaaaaggtaaaaggcttatgagcctaagtttggtnctatattaccatatttactggaattttcttggaaaagtactttaataaagtttaatctnagaaaaaaaaaannna

SEQ ID NO: 268 - DNA, 594 bp, Homo sapiens
  misc_feature (1): n equals a,t,g, or c
  misc_feature (8): n equals a,t,g, or c
ngcaagcngacaccaaccctcactaaagggaacaaaagctggagctccaccgcggtgcggccgctctagaactagtggatcccccgggctgcaggaattcggcacgaggtcagtgtcgggcgcagacggcggcagtgcggcttgctcttggaagttcaggctcggttgtcttttgggagccatggagagtgacttttatctgcgttactacgtggggcacaagggcaagttcggccacgagttcctggagtttgagtttcgaccggacgggaagttaagatatgccaacaacagcaattacaagaatgatgtcatgatcagaaaagaggcttatgtacataaaagcgtgatggaggaactgaagagaataattgacgacagtgaaattaccaaagaggatgatgcattgtggcctcctcctgaccgagtgggccggcaggagcttgaaatcgtcattggagatgaacacatttcttttacaacatcaaaaattggttcccttattgatgtcaatcaatccaaggatccagaaggcttacgagtattttattatcttgtccaggacctgaagtgtttggtcttcagtcttattgg

SEQ ID NO: 269 - DNA, 332 bp, Homo sapiens
  misc_feature (19): n equals a,t,g, or c
  misc_feature (240): n equals a,t,g, or c
  misc_feature (275): n equals a,t,g, or c
  misc_feature (296): n equals a,t,g, or c
  misc_feature (321): n equals a,t,g, or c
  misc_feature (332): n equals a,t,g, or c
gcgggatttgggtcgcagntcttgtttgtggattgctgtgatcgtcacttgacaatgcagatcttcgtgaagactctgactggtaagaccatcaccctcgaggttgagcccagtgacaccatcgagaatgtcaaggcaaagatccaagataaggaaggcatccctcctgaccagcagaggctgatctttgctggaaaacagctggaagatgggcgcaccctgtctgactacaacatccanaaagagtccaccctgcacctggtgctccgtctcanaggtgggatgcaaatcttcgngaagaccctgactggcaagaccatnacccttgaggn

SEQ ID NO: 270 - DNA, 515 bp, Homo sapiens
  misc_feature (3): n equals a,t,g, or c
  misc_feature (4): n equals a,t,g, or c
  misc_feature (7): n equals a,t,g, or c
  misc_feature (10): n equals a,t,g, or c
gcnnganacnaaccctcactaaagggaacaaaagctggagctccaccgcggtgcggccgctctagaactagtggatcccccgggctgcaggaattcggcacgagggatgttgatgtcctgcatctaacgcggtgtaacccccgaagccgagcgagctccggaggaatttcagtatctgctacggtaacttcatcagcccgccaagatggcgatgcaagcggccaagagggcgaacattcgacttccacctgaagtaaatcggatattgtatataagaaatttgccatacaaaatcacagctgaagaaatgtatgatatatttgggaaatatggacctattcgtcaaatcagagtggggaacacacctgaaactagaggaacagcttatgtggtctatgaggacatctttgatgccaagaatgcatgtgatcacctatcgggattcaatgtttgtaacagataccttgtggttttgtactataatgccaacagggcatttcagaagatggacacaa

SEQ ID NO: 271 - DNA, 141 bp, Homo sapiens
  misc_feature (12): n equals a,t,g, or c
  misc_feature (13): n equals a,t,g, or c
  misc_feature (14): n equals a,t,g, or c
  misc_feature (25): n equals a,t,g, or c
  misc_feature (39): n equals a,t,g, or c
  misc_feature (141): n equals a,t,g, or c
cactccatgggnnnctctgtgtggnatttggggcccctncatacttcatttattatattatcaaaactgagagggataggaaagtaaaaacttatccaggtaggaaaattggatcgaacatttcacctctcatattaaggn

SEQ ID NO: 272 - DNA, 433 bp, Homo sapiens
  misc_feature (32): n equals a,t,g, or c
  misc_feature (49): n equals a,t,g, or c
  misc_feature (52): n equals a,t,g, or c
  misc_feature (94): n equals a,t,g, or c
  misc_feature (139): n equals a,t,g, or c
  misc_feature (166): n equals a,t,g, or c
  misc_feature (177): n equals a,t,g, or c
  misc_feature (187): n equals a,t,g, or c
  misc_feature (198): n equals a,t,g, or c
  misc_feature (244): n equals a,t,g, or c
  misc_feature (248): n equals a,t,g, or c
  misc_feature (259): n equals a,t,g, or c
  misc_feature (274): n equals a,t,g, or c
  misc_feature (276): n equals a,t,g, or c
  misc_feature (288): n equals a,t,g, or c
  misc_feature (355): n equals a,t,g, or c
  misc_feature (364): n equals a,t,g, or c
  misc_feature (396): n equals a,t,g, or c
  misc_feature (402): n equals a,t,g, or c
  misc_feature (427): n equals a,t,g, or c
gagcggcggcggaccgcagcgaagtggcgagntagtggcaaacgttganttntgaaggggggcccaagatgaccggttctaacgaagttcaagntgaaccagccacccggaggatagcatctcctccgtaaagttcagncccaacacctcccagttcctgcttgtntcctcctgggncacgtccgtncgactctacgnatgtgccggccaactccatgcggctcaagtaccagcacaccggagncgtnctggactgcgncttctacggtccaangnatgcctggagtngaggactagatcatcagttgaaaatgcatgatttgacactgatcaagaaaatttcttggacccatgntgccctatnagatgtgttgaatactgtcagaagtgaattanaatggnactggaagttggggttagccagttnacctgt

SEQ ID NO: 273 - DNA, 432 bp, Homo sapiens
  misc_feature (187): n equals a,t,g, or c
  misc_feature (190): n equals a,t,g, or c
  misc_feature (332): n equals a,t,g, or c
  misc_feature (371): n equals a,t,g, or c
  misc_feature (373): n equals a,t,g, or c
  misc_feature (380): n equals a,t,g, or c
  misc_feature (430): n equals a,t,g, or c
  misc_feature (432): n equals a,t,g, or c
ggttcatctccgtctcagaaaagagcaaggatcgcggcagcaacacgatcggcgcccgcctgaaccgagtagaagacaaggtgacgcagctggaccagaggctggcactcatcaccgacatgcttcaccagctgctctccttgcacggtggcagcacccctgagcccactgtgcgtggggctcccgnctncaacccctcgcccagtcccagcagccagccaaacacacagaaggggactgccaccttcccttgccagctgctgagccgcagagaagtgacggttcctacacaggacaggggttccttctgggcattacatcgcatagaaatnaataatttgtggtgatttggatctgggttttaatgaatntnacagtgngactttgattattaattgagcaagcttttcctaataaacgtggagaattncn

SEQ ID NO: 274 - DNA, 276 bp, Homo sapiens
  misc_feature (95): n equals a,t,g, or c
  misc_feature (234): n equals a,t,g, or c
  misc_feature (255): n equals a,t,g, or c
  misc_feature (264): n equals a,t,g, or c
  misc_feature (265): n equals a,t,g, or c
  misc_feature (269): n equals a,t,g, or c
gatcgcttctctgggtccaagtctgccagcacggcctccctgaccatctctgggctccaggctgaggacgaggctgattattactgcagctcatntacaagtagtatctcttatgtcttcggaactgggaccaaggtcaccgtcctagtccagcccaaggccaaccccactgttcactcctgtttccccccctcctccttaagaacttccaagcccaacaaaggcaactatgtnttttggaaccattacttctanccgggaaanntttnaaaatgc

SEQ ID NO: 275 - DNA, 351 bp, Homo sapiens
  misc_feature (48): n equals a,t,g, or c
  misc_feature (78): n equals a,t,g, or c
  misc_feature (87): n equals a,t,g, or c
  misc_feature (117): n equals a,t,g, or c
  misc_feature (150): n equals a,t,g, or c
  misc_feature (154): n equals a,t,g, or c
  misc_feature (174): n equals a,t,g, or c
  misc_feature (178): n equals a,t,g, or c
  misc_feature (206): n equals a,t,g, or c
  misc_feature (219): n equals a,t,g, or c
  misc_feature (241): n equals a,t,g, or c
  misc_feature (248): n equals a,t,g, or c
  misc_feature (288): n equals a,t,g, or c
  misc_feature (292): n equals a,t,g, or c
  misc_feature (303): n equals a,t,g, or c
  misc_feature (329): n equals a,t,g, or c
  misc_feature (349): n equals a,t,g, or c
ccgcagactagggcgcctcgggccaggggaacgcggaagagccatggncaccggctaacggggccgtggaaaacgggnaccggacangaagccgccggccctgccgcgccccatccncaacctggaagtcgagttcaccaagatatttancaanaatggaatgggacgaatccnagantgggaaaaagtgtgctacatgttacccntcaactccgggancaaatatgtgaagtggaagaangagatanggccgacgtgggacgaaggctgtggaagctgcacagggtngctnccaaaaagggntcccccatgggcgcccggtgggatgncctgaattccttggccggtngc

SEQ ID NO: 276 - DNA, 463 bp, Homo sapiens
gctgaattctggctgaccagggcagtcaccagagctccagacaatgtctgtctccttcctcatcttcctgcccgtgctgggcctcccatggggtgtcctgtcacaggtgcagctgcagcagtcaggtccaggactggtgaagccctcgcagaccctctcactcacctgtgccatctccggggacactgtctctaggaacagtgctggttggaactggatcaggcagtccccatcgagaggccttgagtggctgggaaggacatactacaggtccaaatggtataatgattatgccgtatctgtgaaaagtcgaataaccatcaacgcagattcaaccaagaatcagttctctctgcagctgaactctgtgactcccgaggacacggctctgtattactgtgcaagagatcggggcagctggtccgatgaagccgaggggctcccgccgcgttacttctactac

SEQ ID NO: 277 - DNA, 463 bp, Homo sapiens
  misc_feature (392): n equals a,t,g, or c
ctgtcctctagagaaaaccctgtgagcacagctcctcaccatggactggacctggaggatcctcttcttggtggcagcagctacaagtgcccactcccaggtgcagctggtgcagtctggtgctgaggtgaagaagcctggggcctcagtgaaggtctcctgcaaggcttctggatacaccttcaccagttatgatatcaactgggtgcgacaggccactggacaggggcttgagtgggtgggatggatgaaccctaacagtgctaacacaggctatgcacagaagttccagggcagagtcaccatgaccaggaacacctccataagcacagcctacatggagctgagcagcctgagatctgaggacacggccgtctattactgtgcgaganggaggcggtgggagctgctcgggatgatgtgggactttgactactggggccagggaaccctggtcaccgtc

SEQ ID NO: 278 - DNA, 343 bp, Homo sapiens
  misc_feature (172): n equals a,t,g, or c
  misc_feature (271): n equals a,t,g, or c
  misc_feature (284): n equals a,t,g, or c
  misc_feature (293): n equals a,t,g, or c
  misc_feature (294): n equals a,t,g, or c
  misc_feature (315): n equals a,t,g, or c
ggcagagggatctcagggcttctttttctgtcctccaccatcatggggtcaaccgccatcctcgccctcctcctggctgttctccaaggagtctgtggcgaggtgcagctggtacatgctggaggagagatgaggaaagcccggggagtctctgaagatctcctgtgaaggntgttgggatacacctttgaacatctactgggatcggctgggtgcgccagatgcccggggaaggcctgggagtgggtggggcatcatatgtcctggtgantctgatggccagngatagccanncttttcgagggccagatgcancatgtgcagtcgacaagtgccaccaaca

SEQ ID NO: 279 - DNA, 436 bp, Homo sapiens
  misc_feature (121): n equals a,t,g, or c
  misc_feature (151): n equals a,t,g, or c
  misc_feature (211): n equals a,t,g, or c
  misc_feature (326): n equals a,t,g, or c
  misc_feature (362): n equals a,t,g, or c
  misc_feature (373): n equals a,t,g, or c
  misc_feature (384): n equals a,t,g, or c
  misc_feature (392): n equals a,t,g, or c
  misc_feature (403): n equals a,t,g, or c
gcaccatggcttggaccccactcctcttcctcaccctcctcctccactgcacagggtctctctcccagcttgtgctgactcaatcgccctctgcctctgcctccctgggagcctcggtcangctcacctgcactctgagcagtgggcacancgactacgccatcgcatggcatcagcagcagccagagaagggccctcggtacttgctgangcttaacactgatggcagccacaggaagggggacgggatccctgatcgcttctcaggctccagctctggggctgagcgctacctcaccatctccagcctccagtctgaggatgangctgactattactgtcagaactggggctttgggatngtattcggcgnaagggaccaanctgaacgncctaagtcagnccaaggctgccccctcggtcaatctgttcccgg

SEQ ID NO: 280 - DNA, 315 bp, Homo sapiens
  misc_feature (76): n equals a,t,g, or c
  misc_feature (138): n equals a,t,g, or c
  misc_feature (224): n equals a,t,g, or c
  misc_feature (246): n equals a,t,g, or c
  misc_feature (280): n equals a,t,g, or c
  misc_feature (308): n equals a,t,g, or c
  misc_feature (315): n equals a,t,g, or c
ggcacgagctcccccagccttgctgaagatccgttccaaggagggcaggtgtgcgcaccatcccgggctatacagnccatctgcctgccctcgatgtataacgatccccagtttggcacaagctgtgagatcactggnctttggaaaaaggaattctagtgaagtgaacaattgcgaactgaacttaggaaggtcctggaggagtgttttgacctggaaaatgnagcccagtgtggttcaagggtnagactgcagagtttagaggtggggagcactgagncggtggcagattgggtcccagggttggnttgaagn

SEQ ID NO: 281 - DNA, 411 bp, Homo sapiens
  misc_feature (305): n equals a,t,g, or c
  misc_feature (339): n equals a,t,g, or c
  misc_feature (358): n equals a,t,g, or c
  misc_feature (376): n equals a,t,g, or c
  misc_feature (403): n equals a,t,g, or c
  misc_feature (411): n equals a,t,g, or c
ggcaggttggagccgctgccgtcgccatgacccgcggtaaccagcgtgagctcgcccgccagaagaatatgaaaaagcagagcgactcggttaagggaaagcgccgagatgacgggctttctgctgccgcccgcaagcagagggactcggagatcatgcagcagaagcagaaaaaggcaaacgagaagaaggaggaacccaagtagctttgtggcttcgtgtccaaccctcttgcccttcgcctgtgtgcctggagccagtcccaccacgctcgcgtttcctcctgtagtgctcacaggtcccancaccgatggcattccctttgccctgagtctgcancgggtcccttttgtgcttncttcccctcaagtacctntttccccctgggccacttccgggggtnaggggggn

SEQ ID NO: 282 - DNA, 570 bp, Homo sapiens
  misc_feature (6): n equals a,t,g, or c
  misc_feature (7): n equals a,t,g, or c
  misc_feature (12): n equals a,t,g, or c
  misc_feature (217): n equals a,t,g, or c
gcaagnngaaantaaccctcactaaagggaacaaaagctggagctccaccgcggtgcggccgctctagaactagtggatcccccgggctgcaggaattcggcacgagtagagacagcgccggggcaagtgagagccggacgggcactgggcgactctgtgcctcgctgaggaaaaataactaaacatgggcaaaggagatcctaagaagccgagagnaaaatgtcatcatatgcattttttgtgcaaacttgtcgggaggagcataagaagaagcacccagatgcttcagtcaacttctcagagttttctaagaagtgctcagagaggtggaagaccatgtctgctaaagagaaaggaaaatttgaagatatggcaaaagcggacaaggcccgttatgaaagagaaatgaaaacctatatccctcccaaaggggagacaaaaaagaagttcaaggatcccaatgcacccaagaggcctccttcggccttcttcctcttctgctctgagtatcgcccaaaaatcaaaggagaacatcctgggctgtccattggtgatgttgcgaagaaact

SEQ ID NO: 283 - DNA, 366 bp, Homo sapiens
  misc_feature (2): n equals a,t,g, or c
  misc_feature (4): n equals a,t,g, or c
  misc_feature (10): n equals a,t,g, or c
  misc_feature (32): n equals a,t,g, or c
  misc_feature (39): n equals a,t,g, or c
  misc_feature (327): n equals a,t,g, or c
  misc_feature (333): n equals a,t,g, or c
  misc_feature (337): n equals a,t,g, or c
  misc_feature (348): n equals a,t,g, or c
  misc_feature (357): n equals a,t,g, or c
gntnatgtgnaattaagacaaataaaaacgtnaagcggnacaaatcacagagagccacaaagcggatttcacacatgcctagcagaccagaactctcggcagttgctacaagggaagaaaggactatgtggatcccttgtggctatgcagatacctacctcacagagttgttgtagaagactggtggtttggttcaaaccttgtgattaaagagtttgtcaagcattttattcttttgaataaaagcaacatatctaaaacatttaaaaaaaaaaaaaaaaaaaaaaaaaaaaaaaaaaaaaaaaaaaaaaaaaaaaaaaaaagggnggccgntttnaaggatccaancttacgaancgtgcatgc

SEQ ID NO: 284 - DNA, 414 bp, Homo sapiens
  misc_feature (389): n equals a,t,g, or c
  misc_feature (394): n equals a,t,g, or c
  misc_feature (395): n equals a,t,g, or c
  misc_feature (398): n equals a,t,g, or c
  misc_feature (407): n equals a,t,g, or c
ggaagctgagacaggcattccaaggggactccatcccggttttcgacctgctgatcctgggggtgggccccgatggtcacacctgctcactcttcccagaccaccccctcctacaggagcgggagaagattgtggctcccatcagtgactccccgaagccaccgccacagcgtgtgaccctcacgctacctgtcctgaatgcagcacgaactgtcatctttgtggcaactggagaaggcaaggcagctgttctgaagcgcattttggaggaccaggaggaaaacccgctgcccgccgcctggtccagccccacaccgggaaactgtgctggtcttggacgaggcggccgccgcttctgaccgtgcccttcgagaaacattccactttgnaactnngcncaaaggacncccaaat

SEQ ID NO: 285 - DNA, 551 bp, Homo sapiens
  misc_feature (5): n equals a,t,g, or c
  misc_feature (8): n equals a,t,g, or c
  misc_feature (22): n equals a,t,g, or c
  misc_feature (24): n equals a,t,g, or c
  misc_feature (64): n equals a,t,g, or c
  misc_feature (180): n equals a,t,g, or c
  misc_feature (186): n equals a,t,g, or c
  misc_feature (225): n equals a,t,g, or c
  misc_feature (234): n equals a,t,g, or c
  misc_feature (271): n equals a,t,g, or c
  misc_feature (296): n equals a,t,g, or c
  misc_feature (298): n equals a,t,g, or c
  misc_feature (319): n equals a,t,g, or c
  misc_feature (322): n equals a,t,g, or c
  misc_feature (324): n equals a,t,g, or c
  misc_feature (325): n equals a,t,g, or c
  misc_feature (365): n equals a,t,g, or c
  misc_feature (368): n equals a,t,g, or c
  misc_feature (410): n equals a,t,g, or c
  misc_feature (482): n equals a,t,g, or c
  misc_feature (526): n equals a,t,g, or c
  misc_feature (528): n equals a,t,g, or c
  misc_feature (536): n equals a,t,g, or c
  misc_feature (545): n equals a,t,g, or c
gtccngcntgagccgcacggcngnacgctcgtcttcgcccgccatggccgagagcgactggganacggtgacggtgctgcgcaagaagggccctacggacgcccagcaacatccaagcaggctatcttagcggcacaaagactaggagaagatgtggagacttccaataaatgggctgcnggccanaacaaacaacattctattaccaagaacacggccaagctngaccggganacagagtgctgcaccatgacaggtgaccctgaagtgngtcaagtgatccagcaagtcggcanancaagggcttacacataacganctngnnacgaaaatcatgataagccacagtgatcgcagactatganagnggtacggccatacccaataaccagtgcttggcaaaatcgacnggaccattggctccaagctccgggaaagacattggaaaacccatcgagaagggcctaggcgaaatgaacacnaagcctcgaaatcatgagctccagctgatctcttccgccgttcncntggccgcnattccgttntcctca

SEQ ID NO: 286 - DNA, 615 bp, Homo sapiens
  misc_feature (3): n equals a,t,g, or c
gcngacaccaaccctcactaaagggaacaaaagctggagctccaccgcggtgcggccgctctagaactagtggatcccccgggctgcaggaattcggcacgagtattgcctctgagggagtccaactgtatacctgcatcagtgtcattcctttgtgtgatttcttaatgctgtatttgttcatctcaaacctagatgtatacagctctgagttataaatggttataaagctcctgttactcatattagttatttacatcaaaaagcttttagaaaatggtacgaggtaaccaattcttgtcatggtgaaatctgattgagtaaccaagcagttttactattctggtgctgcttcataacaaaaatgaaaagctgcatgcatctacagcaggcatggattgtttatgtcgtatgatatcctttattaagtaagttcacttatagtatttctataatttgattcattgccgtaatagagccatgtaggaaatgcactgattgcatgttattgtggcaagaatatcctaaatgtcattaaaatcctccaacatgatggatctacttatggtcttgtttgttgacatgacaaattaacattcttatagttacatctgg

SEQ ID NO: 287 - DNA, 302 bp, Homo sapiens
  misc_feature (221): n equals a,t,g, or c
  misc_feature (226): n equals a,t,g, or c
  misc_feature (237): n equals a,t,g, or c
  misc_feature (286): n equals a,t,g, or c
  misc_feature (296): n equals a,t,g, or c
gcggaatgtcacacacattgatcaggcactccaggaagctcatcgggtgctgaaaccaggaggacggtttctctgtctggaatttagccaagtgaacaatcccctcatatccaggctttatgatctatatagcttccaggtcatccctgtcctgggagaggtcatcgctggagactggaagtcctatcagtaccttgtagagagtatccgaaggtttccgnctcangaagagttcanggacatgatagaagatgcaggctttcacaaggtgacttacgaaagtctnacatcaggcnttgtgg

SEQ ID NO: 288 - DNA, 414 bp, Homo sapiens
  misc_feature (53): n equals a,t,g, or c
  misc_feature (57): n equals a,t,g, or c
  misc_feature (63): n equals a,t,g, or c
  misc_feature (83): n equals a,t,g, or c
  misc_feature (86): n equals a,t,g, or c
  misc_feature (91): n equals a,t,g, or c
  misc_feature (95): n equals a,t,g, or c
  misc_feature (96): n equals a,t,g, or c
  misc_feature (100): n equals a,t,g, or c
  misc_feature (107): n equals a,t,g, or c
  misc_feature (116): n equals a,t,g, or c
  misc_feature (147): n equals a,t,g, or c
  misc_feature (153): n equals a,t,g, or c
  misc_feature (157): n equals a,t,g, or c
  misc_feature (158): n equals a,t,g, or c
  misc_feature (168): n equals a,t,g, or c
  misc_feature (201): n equals a,t,g, or c
  misc_feature (205): n equals a,t,g, or c
  misc_feature (208): n equals a,t,g, or c
  misc_feature (212): n equals a,t,g, or c
  misc_feature (216): n equals a,t,g, or c
  misc_feature (221): n equals a,t,g, or c
  misc_feature (227): n equals a,t,g, or c
  misc_feature (233): n equals a,t,g, or c
  misc_feature (253): n equals a,t,g, or c
  misc_feature (275): n equals a,t,g, or c
  misc_feature (281): n equals a,t,g, or c
  misc_feature (292): n equals a,t,g, or c
  misc_feature (298): n equals a,t,g, or c
  misc_feature (299): n equals a,t,g, or c
  misc_feature (315): n equals a,t,g, or c
  misc_feature (318): n equals a,t,g, or c
  misc_feature (332): n equals a,t,g, or c
  misc_feature (341): n equals a,t,g, or c
  misc_feature (348): n equals a,t,g, or c
  misc_feature (354): n equals a,t,g, or c
  misc_feature (359): n equals a,t,g, or c
  misc_feature (363): n equals a,t,g, or c
  misc_feature (364): n equals a,t,g, or c
  misc_feature (372): n equals a,t,g, or c
  misc_feature (379): n equals a,t,g, or c
  misc_feature (385): n equals a,t,g, or c
  misc_feature (390): n equals a,t,g, or c
  misc_feature (402): n equals a,t,g, or c
aattcggcacgagagagagagagagagagagagagagagagagagagagagtngcgntagttngtgtgtcctcggtttctcgnctnctggntcgnncccncccacanctggggcgntctatgtcgagtggcgcccatggcgaagagntctcanctcnnatgtggaagnctctcaccttcttcgtcgcgctccccggggtgncagncancatnctgnatgtntacctnaagtcncaccacggagagcacgaganacccgagttcatcgtctacccntatctncgtatcaggancaagcnntttccctggggagatngtnaccatacttttttncataacccntatgtgnatccanttccncttnntacggagntgtatanagagantttgnccattaccgggncaacagggccca

SEQ ID NO: 289 - DNA, 184 bp, Homo sapiens
  misc_feature (7): n equals a,t,g, or c
  misc_feature (9): n equals a,t,g, or c
  misc_feature (14): n equals a,t,g, or c
  misc_feature (25): n equals a,t,g, or c
  misc_feature (35): n equals a,t,g, or c
  misc_feature (101): n equals a,t,g, or c
  misc_feature (142): n equals a,t,g, or c
  misc_feature (159): n equals a,t,g, or c
  misc_feature (175): n equals a,t,g, or c
  misc_feature (176): n equals a,t,g, or c
ggacttnanttctntggaatgcatngaatggcagngacgcattggccctgcccttggcctgcattgatgacgagatggactgtgagcctcagggccccgcncctggcccagctctccgatgtggccatgcacagcctgggtntggctttcatctatgancagactgacgacatcnnggatgttc

SEQ ID NO: 290 - DNA, 207 bp, Homo sapiens
  misc_feature (9): n equals a,t,g, or c
  misc_feature (15): n equals a,t,g, or c
  misc_feature (21): n equals a,t,g, or c
  misc_feature (45): n equals a,t,g, or c
  misc_feature (63): n equals a,t,g, or c
  misc_feature (107): n equals a,t,g, or c
  misc_feature (133): n equals a,t,g, or c
  misc_feature (149): n equals a,t,g, or c
  misc_feature (160): n equals a,t,g, or c
  misc_feature (176): n equals a,t,g, or c
  misc_feature (200): n equals a,t,g, or c
ggacgtacngtcctnctagtngaggaatatgtcgagtttctctanggctgccccagcaatggnccacttttgctaaaatatggtatatcttagatgggaaaatgcanccacctggcaaacttgctgctatggnatctataagacttcanggattacatanacctgcgtaccatgcnctgactgactgtggggatcatgtntgttata

SEQ ID NO: 291 - DNA, 492 bp, Homo sapiens
  misc_feature (33): n equals a,t,g, or c
  misc_feature (437): n equals a,t,g, or c
  misc_feature (448): n equals a,t,g, or c
  misc_feature (472): n equals a,t,g, or c
  misc_feature (474): n equals a,t,g, or c
  misc_feature (477): n equals a,t,g, or c
gaagagacattgaacctggagaagaaatttctngttattatggagatgggttctttggagaaaataatgagttctgcgagtgttacacttgcgaaagacggggcactggtgcttttaaatccagagtgggactgcctgcgcctgctcctgttatcaatagcaaatatggactcagagaaacagataaacgtttaaataggcttaaaaagttaggtgacagcagcaaaaattcagacagtcaatctgtcagctctaacactgatgcagataccactcaggaaaaaaacaatgcaacttctaaccgaaaatcttcagttggcgtaaaaaagaatagcaagagcagaacgttaacgaggcaatctatgtcaagaattccagcttcttccaactctacctcatctaagcttaactcatataaataattccagggtaccaanagaaactgaanaaagtctgcaaagcctttactttnanagntaaacattgagaaat

SEQ ID NO: 292 - DNA, 237 bp, Homo sapiens
  misc_feature (16): n equals a,t,g, or c
  misc_feature (19): n equals a,t,g, or c
  misc_feature (42): n equals a,t,g, or c
  misc_feature (65): n equals a,t,g, or c
  misc_feature (79): n equals a,t,g, or c
  misc_feature (110): n equals a,t,g, or c
  misc_feature (111): n equals a,t,g, or c
  misc_feature (123): n equals a,t,g, or c
  misc_feature (129): n equals a,t,g, or c
  misc_feature (167): n equals a,t,g, or c
  misc_feature (186): n equals a,t,g, or c
  misc_feature (192): n equals a,t,g, or c
  misc_feature (210): n equals a,t,g, or c
  misc_feature (226): n equals a,t,g, or c
gggggacatgccatanccntccttgggggcctatggaacctncaaagcggccgtggcgcttactnatggacacattcanctgtaaactccttccctggggggtcaaggtnnaccatcatccancctggntgcttcaagacagagtcagtgaagaaacgtgggttcantgggaaaagcgccaacaanttgctnctggcccaaccttgtctnaagagcttctgcaggncttacgggaaa

SEQ ID NO: 293 - DNA, 630 bp, Homo sapiens
  misc_feature (2): n equals a,t,g, or c
  misc_feature (580): n equals a,t,g, or c
  misc_feature (588): n equals a,t,g, or c
  misc_feature (594): n equals a,t,g, or c
  misc_feature (608): n equals a,t,g, or c
  misc_feature (609): n equals a,t,g, or c
gnttggaaagacaccacttggagtttggcaaaacactgctcagagacgagagcctgaatatctttcaaaacctcaatcgtcgacagcatgagcatgccatccacatgatggacattgcaatcattgccacagacctcgccctgtatttcaagaagaggacgatgttccaaaagatcgtggatcagtctaagacatatgagagttaacaggagtggacacagtacatgatgctggagcagacacggaaggaaatcgttatggccatgatgatgaccgcctgtgatctctcagccatcaccaaaccctgggaggtgcagagccaggtagctctgctggtggctgctgaattctgggaacaaggtgacctggagcgcacggtgctgcaacagaatcccattcccatgatggacagaaacaaagcagatgaactccctaagcttcaagtcggcttcattgactttgtttgcaccttcgtctacaaggaattctcccgtttccacgaggagatcaccccaatgttggacgggatcaccaacaatcgcaaggagtggaaggccgcttgctgatgaatacgatgccnagatgaangtgcangaagagaagaaacnnaaaccagcaagtcggccaagt

SEQ ID NO: 294 - DNA, 346 bp, Homo sapiens
  misc_feature (1): n equals a,t,g, or c
  misc_feature (2): n equals a,t,g, or c
  misc_feature (12): n equals a,t,g, or c
  misc_feature (24): n equals a,t,g, or c
  misc_feature (83): n equals a,t,g, or c
  misc_feature (113): n equals a,t,g, or c
  misc_feature (205): n equals a,t,g, or c
  misc_feature (206): n equals a,t,g, or c
  misc_feature (207): n equals a,t,g, or c
  misc_feature (220): n equals a,t,g, or c
  misc_feature (249): n equals a,t,g, or c
nnagcgctcgcnagtggaacactnattggaatccaaaaaattcggacagtgggaaatactggggtaaatcctggttaccccanaactataccctggttgatatgaagattgantttggtgttgatataaccaccaaagaaatggttcttgctgatgattcctggagactggccattacgagtattgaagccaacagtaaagacannnagtcttactgggngctcaaagaagtaactcctgaagggctcnaaatggtaaagaaaagctttgaggccgggcacggtgactcatgcctgtaatcccagcactttgggaggccaaggcaggcagatcacccaaggtcagg

SEQ ID NO: 295 - DNA, 531 bp, Homo sapiens
  misc_feature (206): n equals a,t,g, or c
  misc_feature (209): n equals a,t,g, or c
  misc_feature (277): n equals a,t,g, or c
  misc_feature (286): n equals a,t,g, or c
  misc_feature (311): n equals a,t,g, or c
  misc_feature (319): n equals a,t,g, or c
  misc_feature (320): n equals a,t,g, or c
  misc_feature (345): n equals a,t,g, or c
  misc_feature (353): n equals a,t,g, or c
  misc_feature (365): n equals a,t,g, or c
  misc_feature (374): n equals a,t,g, or c
  misc_feature (383): n equals a,t,g, or c
  misc_feature (421): n equals a,t,g, or c
  misc_feature (423): n equals a,t,g, or c
  misc_feature (425): n equals a,t,g, or c
  misc_feature (427): n equals a,t,g, or c
  misc_feature (430): n equals a,t,g, or c
  misc_feature (432): n equals a,t,g, or c
  misc_feature (438): n equals a,t,g, or c
  misc_feature (441): n equals a,t,g, or c
  misc_feature (444): n equals a,t,g, or c
  misc_feature (448): n equals a,t,g, or c
  misc_feature (462): n equals a,t,g, or c
  misc_feature (463): n equals a,t,g, or c
  misc_feature (464): n equals a,t,g, or c
  misc_feature (471): n equals a,t,g, or c
  misc_feature (495): n equals a,t,g, or c
  misc_feature (508): n equals a,t,g, or c
  misc_feature (519): n equals a,t,g, or c
gttctgtctcgctgatgtcagacctggagggcaacaccaagtcacgtgtccgcctgttggtcctcgtgccaccctccaaaccagaatgcggcatcgagggagagaccataattgggaacaacatccagctgacctgccaatcaaaggagggctcaccaacccctccagtacagctggaaagaagttacaacatcctgaatcaagancancccctggccccacccacctcaggttcaacctgttctcccttaaaaaatatctcccacagaacacatcnggtttatantcttgttcctcccagcaataagaanggaaaccnntttctgcaacttcacggtggccttncaaatctnccccccataaantttggcccntttttttgnctccccgggggggttttttttttcaccccccttatccntngngncancnccttanggngcngccncccaggggaaagannnaaccccnaaaaaaagggaaaaccgggcaccnggaccctttgaanaccccacactntaaaatttccaa

SEQ ID NO: 296 - DNA, 572 bp, Homo sapiens
  misc_feature (435): n equals a,t,g, or c
  misc_feature (446): n equals a,t,g, or c
  misc_feature (451): n equals a,t,g, or c
  misc_feature (465): n equals a,t,g, or c
  misc_feature (489): n equals a,t,g, or c
  misc_feature (501): n equals a,t,g, or c
  misc_feature (539): n equals a,t,g, or c
  misc_feature (546): n equals a,t,g, or c
  misc_feature (570): n equals a,t,g, or c
ggttctgcccccactgcttataatgctggtgatctacattaagatcttcctggtggcctgcaggcagcttcagcgcactgagctgatggaccactcgaggaccaccctccagcgggagatccatgcagccaagtcactggccatgattgtggggatttttgccctgtgctggttacctgtgcatgctgttaactgtgtcactcttttccagccagctcagggtaaaaataagcccaagtgggcaatgaatatggccattcttctgtcacatgccaattcagttgtcaatcccattgtctatgcttaccggaaccgagacttccgctacacttttcacaaaattatctccaggtatcttctctgccaagcagatgtcaagagtgggaatggtcaggctggggtacagcctgctctcggtgtgggcctatgatctangctctcgcctnttcangagaagatcaaatncacaagaaacaaagaggacacggntggttttattgngaaagatagctacaccttacaaggaaatggactggctnttttgancacttcctggaactaccacgtatnta

SEQ ID NO: 297 - DNA, 334 bp, Homo sapiens
  misc_feature (44): n equals a,t,g, or c
  misc_feature (67): n equals a,t,g, or c
  misc_feature (74): n equals a,t,g, or c
  misc_feature (84): n equals a,t,g, or c
  misc_feature (90): n equals a,t,g, or c
  misc_feature (106): n equals a,t,g, or c
  misc_feature (108): n equals a,t,g, or c
  misc_feature (118): n equals a,t,g, or c
  misc_feature (131): n equals a,t,g, or c
  misc_feature (167): n equals a,t,g, or c
  misc_feature (176): n equals a,t,g, or c
  misc_feature (177): n equals a,t,g, or c
  misc_feature (219): n equals a,t,g, or c
  misc_feature (227): n equals a,t,g, or c
  misc_feature (263): n equals a,t,g, or c
  misc_feature (292): n equals a,t,g, or c
  misc_feature (293): n equals a,t,g, or c
  misc_feature (315): n equals a,t,g, or c
  misc_feature (316): n equals a,t,g, or c
  misc_feature (317): n equals a,t,g, or c
  misc_feature (319): n equals a,t,g, or c
ggcagaaagaaaggccctgctcctccagggctccaacgagatcnaaatccgcgcccgagggcaacanccgcttnacctacagcntcactntcgatggctgcacgantnacaccggagncctggggcaaganagtgaattgaattacaaaaccaccaagacctcccgnttgcccatnnatcgatgtggcccccttggaacgttggtgccccaaaccaggnaattcggnttcgaacgttgggccctgtttggtttcctgtaaaantcccttccattcccaacctgggttccctnnccaacccaaccaaatttttccnnncnaacccgggaaacagg

SEQ ID NO: 298 - DNA, 293 bp, Homo sapiens
  misc_feature (23): n equals a,t,g, or c
  misc_feature (165): n equals a,t,g, or c
  misc_feature (199): n equals a,t,g, or c
  misc_feature (237): n equals a,t,g, or c
atggaggccgctgactaccgagnggccagcagccagcagggcctggcctatgccacagaggctgtctatgaaagcgcagaggccccgggccactatcccgcagaggacagcacctacgatgagtacgagaacgatctggggatcacagccgtcgccctgtacgantaccaggctgcgggcgatgatgagatctcatttnaccctgatgacatcatcaccaacatcgagatgattgangacggctggtggcgcggggtgtgcaagggccgcttcagggagctcgcattctcttg

SEQ ID NO: 299 - DNA, 418 bp, Homo sapiens
  misc_feature (29): n equals a,t,g, or c
  misc_feature (59): n equals a,t,g, or c
  misc_feature (71): n equals a,t,g, or c
  misc_feature (76): n equals a,t,g, or c
  misc_feature (78): n equals a,t,g, or c
  misc_feature (114): n equals a,t,g, or c
  misc_feature (154): n equals a,t,g, or c
  misc_feature (168): n equals a,t,g, or c
  misc_feature (213): n equals a,t,g, or c
  misc_feature (221): n equals a,t,g, or c
  misc_feature (241): n equals a,t,g, or c
  misc_feature (260): n equals a,t,g, or c
  misc_feature (269): n equals a,t,g, or c
  misc_feature (278): n equals a,t,g, or c
  misc_feature (284): n equals a,t,g, or c
  misc_feature (292): n equals a,t,g, or c
  misc_feature (294): n equals a,t,g, or c
  misc_feature (313): n equals a,t,g, or c
  misc_feature (330): n equals a,t,g, or c
  misc_feature (334): n equals a,t,g, or c
  misc_feature (346): n equals a,t,g, or c
  misc_feature (347): n equals a,t,g, or c
  misc_feature (352): n equals a,t,g, or c
  misc_feature (354): n equals a,t,g, or c
  misc_feature (355): n equals a,t,g, or c
  misc_feature (358): n equals a,t,g, or c
  misc_feature (373): n equals a,t,g, or c
  misc_feature (377): n equals a,t,g, or c
  misc_feature (379): n equals a,t,g, or c
  misc_feature (383): n equals a,t,g, or c
  misc_feature (392): n equals a,t,g, or c
  misc_feature (393): n equals a,t,g, or c
  misc_feature (408): n equals a,t,g, or c
aattcggcacgaggggcctgggcgttttnttgttggtcttcgtgctgggtctgggtctnaccccaccgacnttggntnaggataactccaggtacacacacttcctgacccagnactatgatgccaaaccacagggccgggatgacagatactntgaaagcatcatgnggagacggggcctgacctgaccctgcaaagacatcaacacatttnttcatggnaacaagcgcagattcaaggncatctgtgaaaacaaggantggaaaccnttacagggnaacctnaggtttangnaagttttttttttccaggnaaccatttggaaagttnaatngggggtttcccnngggtntnnaangactttcccggggcnaaangngggnttaaaaaannttttttttttttttngaaaaaggtt

SEQ ID NO: 300 - DNA, 346 bp, Homo sapiens
  misc_feature (41): n equals a,t,g, or c
  misc_feature (97): n equals a,t,g, or c
  misc_feature (107): n equals a,t,g, or c
  misc_feature (277): n equals a,t,g, or c
  misc_feature (296): n equals a,t,g, or c
  misc_feature (317): n equals a,t,g, or c
  misc_feature (320): n equals a,t,g, or c
  misc_feature (330): n equals a,t,g, or c
ccacaaacagtttgcatccctagaacatggcattgtgccanttaccagtgattgccagtacctcttccctgccaaggttgtctctcgcctggtgaantgggtgacanttgcccatgaggattacatggagctgcacttcaccaaagacattgtggatgcgggactggctggggacaccaatctctactacatggcgctcatcgaaaggggcacagccaaactgcaggccgctgtggtgttgaaccctggctactcctccatcccacctgttttccanctctgtttgaactggaaangggagaaaaccaacagcaacnatnacaacattcngggccatggagggcga

SEQ ID NO: 301 - DNA, 213 bp, Homo sapiens
  misc_feature (19): n equals a,t,g, or c
  misc_feature (46): n equals a,t,g, or c
  misc_feature (60): n equals a,t,g, or c
  misc_feature (66): n equals a,t,g, or c
  misc_feature (80): n equals a,t,g, or c
  misc_feature (119): n equals a,t,g, or c
  misc_feature (130): n equals a,t,g, or c
  misc_feature (165): n equals a,t,g, or c
  misc_feature (170): n equals a,t,g, or c
  misc_feature (202): n equals a,t,g, or c
gctttataatctgctcatntttgcctaataaatgcaacatccacangaactgaatttctnaaaaanttggtactaccagntattggttcgtttacaattattgatggaaatcaagtcancggacaaaatnctggaaacaatttcttccttcaaaaaatcttatcngcaanaaccgactgaagctgccatagatttccttacnagaattaaata

SEQ ID NO: 302 - DNA, 440 bp, Homo sapiens
  misc_feature (121): n equals a,t,g, or c
  misc_feature (324): n equals a,t,g, or c
  misc_feature (342): n equals a,t,g, or c
  misc_feature (363): n equals a,t,g, or c
  misc_feature (382): n equals a,t,g, or c
ggcacgagcgagaccccagcaggcaccatcctttaccacgctcatttagacatcgaggccttcaccatggaccgggaagtgcgcaaaatcaaacaaggcctgggcttgaaatttgctgagntggtgtataccggtttctggcacagccctgagtgtgaatttgtccgccactgcatcgccaagtcccaggagcgagtggaagggaaagtgcaggtgtccgtcctcaagggccaggtgtacatcctcggccgggagtccccactgtctctctacaatgaggagctggtgagcatggatgagaacctcatgcacatcagctacgangctggaatcctggagaancccaagaaccaagcgctccangtcttaaacgaagacccangacccagccaaagccccaacaaccctgacatctccgagatcgagttcaaaaaagggtc

SEQ ID NO: 303 - DNA, 495 bp, Homo sapiens
  misc_feature (22): n equals a,t,g, or c
ctcataagggaccaaagctggngctccaccgcggtggcggccgctctagcactagtggatcccccgggctgcaggacgccatgttggggtttgtgggtcgggtggccgctgctccggcctccggggccttgcggagactcaccccttcagcgtcgctgcccccagctcagctcttactgcgggccgtccgacggcggtccatcctggtgagagcacagtaaggactattgctatggatggtacagaaggcttggttagaggccagaaagtactggattctggtgcaccaatcaaaattcctgttggtcctgagactttgggcagaatcatgaatgtcattggagaacctattgatgaaagaggtcccatcaaaaccaaacaatttgctcccattcatgctgaggctccagagttcatggaaatgagtgttgagcaggaaatcttgtgactggtatcaaggttgtcgatctgctagcttcctatgccaagggtggc

SEQ ID NO: 304 - DNA, 293 bp, Homo sapiens
  misc_feature (284): n equals a,t,g, or c
  misc_feature (286): n equals a,t,g, or c
  misc_feature (287): n equals a,t,g, or c
  misc_feature (289): n equals a,t,g, or c
  misc_feature (292): n equals a,t,g, or c
ggtcagggacaagatggtgccaccggtgcaggtctctccgctcatcaagattacctaaaacctcgggcagaagaggagaggaggatagcagcagaagagaagaagaagcaggatgaactgaaacggattgccagagaattggcagaagatgacagcatattaaagtgagtgaccctgcgacccactctttggaccagcagcggatgaataaagcttcctgtgttgtgtgaaaaaaaaaaaaaaaaaaaaaaaaaaaaaaaaaaaaaaaaaaaaaaaggggcggncnntnttna

SEQ ID NO: 305 - DNA, 261 bp, Homo sapiens
  misc_feature (17): n equals a,t,g, or c
  misc_feature (36): n equals a,t,g, or c
  misc_feature (181): n equals a,t,g, or c
  misc_feature (190): n equals a,t,g, or c
  misc_feature (205): n equals a,t,g, or c
ccggaatcggccctgtngcccccgcccgcactccanagccggctgagaacggcagcggcgagggctccacgtgcagcgtctctccgggcaccttcgggtccaggactacaactcccggcagggtgcgcaaaacgaccgcccaaggcaacggaggctcacgagaatcagcatgattcttcanaggctcttnaggttctcctctgtnattcggtcagccgtctcagtccatttgcggaggaacattggtgttacagcagttgg

SEQ ID NO: 306 - DNA, 502 bp, Homo sapiens
  misc_feature (41): n equals a,t,g, or c
  misc_feature (147): n equals a,t,g, or c
  misc_feature (165): n equals a,t,g, or c
  misc_feature (173): n equals a,t,g, or c
  misc_feature (186): n equals a,t,g, or c
  misc_feature (213): n equals a,t,g, or c
  misc_feature (253): n equals a,t,g, or c
  misc_feature (260): n equals a,t,g, or c
  misc_feature (270): n equals a,t,g, or c
  misc_feature (274): n equals a,t,g, or c
  misc_feature (293): n equals a,t,g, or c
  misc_feature (316): n equals a,t,g, or c
  misc_feature (324): n equals a,t,g, or c
  misc_feature (346): n equals a,t,g, or c
  misc_feature (423): n equals a,t,g, or c
  misc_feature (436): n equals a,t,g, or c
  misc_feature (462): n equals a,t,g, or c
  misc_feature (468): n equals a,t,g, or c
  misc_feature (488): n equals a,t,g, or c
gcaacactaaaggacgaacctgatctcttatactagtatcnttaatcatttttattgccacaactaacctcctcggactcctgcctcactcatttacaccaaccacccaactatctataatcctagccatggccatccccttatgancgggcgcagtgattatangctttcgntctaagattaaanatgccctagcccacttcttatcaaaangcacacctacaccccttatccccatactagttattatggnaaacatnatcctactcnttcnaccaatagccctgggcgtnagcctaatcgcttacattactgnagggcacntactcatgcacctcattggaancgtcccctacaatatcaatcattaaacttccctctacacttatctcttcacattctattctaacttaatatcctaanaaattccttttcnctttattccaagcccaactttttccnactttnttcttaaaccccttactttncgaaaaaccttttt

SEQ ID NO: 307 - DNA, 119 bp, Homo sapiens
  misc_feature (14): n equals a,t,g, or c
  misc_feature (33): n equals a,t,g, or c
  misc_feature (40): n equals a,t,g, or c
  misc_feature (67): n equals a,t,g, or c
  misc_feature (76): n equals a,t,g, or c
  misc_feature (113): n equals a,t,g, or c
aaccgactatgganttacagccacaaagcaagnggtgaangctggaacattcttttggtctgttgtnatccctcanttgcggagaatattaaccatattgcagtggctcaccntaccag

SEQ ID NO: 308 - DNA, 403 bp, Homo sapiens
  misc_feature (9): n equals a,t,g, or c
  misc_feature (11): n equals a,t,g, or c
  misc_feature (13): n equals a,t,g, or c
  misc_feature (344): n equals a,t,g, or c
  misc_feature (368): n equals a,t,g, or c
  misc_feature (375): n equals a,t,g, or c
  misc_feature (388): n equals a,t,g, or c
  misc_feature (389): n equals a,t,g, or c
gcggacggncngngaaggtgcttaagcggctgcgacttcagaagcgaggcacaggcggtgtggacacggctgcggtgggcggggtcttcgacgtctccaacgctgaccgcctgggcttctcagaggtggagctggtgcagatggtggtggacggagtgaagctgctcatcgagatggagcagcggctggagcagggccaggccatcgacgacctcatgcctgcccagaaatgaagcccggcccacacccgacaccagccctgctgcttcctaacttattgcctgggcagtgcccaccatgcacccctgatgttcgccgtctggcgagcccttagccttgctgtnagagattccgttcaaccttggtanaatttanttttttgatgggnnaagatatgctgatg

SEQ ID NO: 309 - DNA, 559 bp, Homo sapiens
  misc_feature (5): n equals a,t,g, or c
aagcngacaccaccctcactaaagggaacaaaagctggagctccaccgcggtgcggccgctctagaactagtggatcccccgggctgcaggaattcggcacgaggtttatctcaaggcctgagtagccggtaacaaacgagggttcccgggattggaccgacgcagccatgcctctgcgacttgatatcaaaagaaagctaactgctagatctgatcgagttaagagtgtggatctgcatcctacagagccatggatgttggcaagtctttacaatggcagtgtgtgtgtttggaatcatgaaacacagacactggtgaagacatttgaagtatgtgatcttcctgttcgagctgcaaagtttgttgcaaggaagaattgggttgtgacaggagcggatgacatgcagattagagtgttcaattacaatactctggagagagttcatatgtttgaagcacactcagactacattcgctgtattgctgttcatccaacccagcctttcattctaactagcagtgatgacatgcttattaagctctgggactgggataaaa

SEQ ID NO: 310 - DNA, 521 bp, Homo sapiens
  misc_feature (9): n equals a,t,g, or c
  misc_feature (227): n equals a,t,g, or c
  misc_feature (245): n equals a,t,g, or c
  misc_feature (494): n equals a,t,g, or c
ggagatgtntcgctccgtggccttagctgtgctcgcgctactctctctttctggcctggaggctatccagcgtactccaaagattcaggtttactcacgtcatccagcagagaatggaaagtcaaatttcctgaattgctatgtgtctgggtttcatccatccgacattgaagttgacttactgaagaatggagagagaattgaaaaagtggagcattcagacttgnctttcagcaaggactggnctttctatctcttgtactacactgaattcacccccactgaaaaagatgagtatgcctgccgtgtgaaccatgtgactttgtcacagcccaagatagttaagtgggatcgagacatgtaagcagcatcatggaggtttgaagatgccgcatttggattggatgaattccaaattctgcttgcttgctttttaatattgatatgcttatacacttacactttatgcacaaaatgtagggttataataatgntaacatggacatgatcttctttataat

SEQ ID NO: 311 - DNA, 591 bp, Homo sapiens
  misc_feature (51): n equals a,t,g, or c
  misc_feature (52): n equals a,t,g, or c
  misc_feature (528): n equals a,t,g, or c
  misc_feature (537): n equals a,t,g, or c
  misc_feature (557): n equals a,t,g, or c
  misc_feature (563): n equals a,t,g, or c
  misc_feature (571): n equals a,t,g, or c
ggccccctgcaggtaccggtccggaattcccgggtacggctgcgagaagannacagaaggggattcctgaagctgacagcattcgggccgagatgtctcgctccgtggccttagctgtgctcgcgctactctctctttctggcctggaggctatccagcgtactccaaagattcaggtttactcacgtcatccagcagagagtggaaagtcaaatttcctgaattgctatgtgtctgggtttcatccatccgacattgaagttgacttactgaagaatggagagagaattgaaaaagtggagcattcagacttgtctttcagcaaggactggtctttctatctcttgtactacactgaattcacccccactgaaaaagatgagtatgcctgccgtgtgaaccatgtgactttgtcacagcccaagatagttaagtgggatcgagacatgtaagcagcatcatggaggtttgaagatgcccgcatttggattggatgaattcaaattctgcttgcttggtttttaatantgatatgcntatacacttacctttatgcncaaaanggtagggntataataatggtaacatggg

SEQ ID NO: 312 - DNA, 584 bp, Homo sapiens
  misc_feature (4): n equals a,t,g, or c
  misc_feature (14): n equals a,t,g, or c
  misc_feature (20): n equals a,t,g, or c
  misc_feature (33): n equals a,t,g, or c
  misc_feature (35): n equals a,t,g, or c
  misc_feature (119): n equals a,t,g, or c
  misc_feature (259): n equals a,t,g, or c
  misc_feature (262): n equals a,t,g, or c
  misc_feature (299): n equals a,t,g, or c
  misc_feature (310): n equals a,t,g, or c
  misc_feature (327): n equals a,t,g, or c
  misc_feature (329): n equals a,t,g, or c
  misc_feature (330): n equals a,t,g, or c
  misc_feature (350): n equals a,t,g, or c
  misc_feature (365): n equals a,t,g, or c
  misc_feature (400): n equals a,t,g, or c
  misc_feature (424): n equals a,t,g, or c
  misc_feature (437): n equals a,t,g, or c
  misc_feature (508): n equals a,t,g, or c
  misc_feature (527): n equals a,t,g, or c
  misc_feature (535): n equals a,t,g, or c
  misc_feature (553): n equals a,t,g, or c
  misc_feature (576): n equals a,t,g, or c
gagnttcccgggtncgacgncacgcgtccgaantnaaaatttttaaaaaaaaaaaaaaaaaaaaaaaaaaaaaagggcggccgttctagaggatccaagcttacgtacgcgtgcatgcnacgtcatagctcttctatagtgtcacctaaattcaattcactggccgtcgttttacaacgtcgtgactgggaaaaccctggcgttacccaacttaatcgccttgcagcacatccccctttcgccagctggcgtaatagcnaanaggcccgcaccgatcgcccttcccaacagttgcgcancctgaatggcnaatgggacgcgccctgnannggcgcattaagcgcggcggntgaggtggttacgcncagcgtgaccgctacacttgccagtgccctagcgnccgctcctttcgctttcttccctncctttctcgccangttcgccggctttccccgtcaagctctaaatcgggggctccctttagggttccgatttagtgctttacggnaccttcgaccccaaaaaanttgattanggtgatggttcacgtaantgggccatcgcccttgatagacnggtttttc

SEQ ID NO: 313 - DNA, 763 bp, Homo sapiens
  misc_feature (11): n equals a,t,g, or c
  misc_feature (12): n equals a,t,g, or c
  misc_feature (52): n equals a,t,g, or c
  misc_feature (54): n equals a,t,g, or c
  misc_feature (264): n equals a,t,g, or c
  misc_feature (297): n equals a,t,g, or c
  misc_feature (331): n equals a,t,g, or c
  misc_feature (372): n equals a,t,g, or c
  misc_feature (431): n equals a,t,g, or c
  misc_feature (496): n equals a,t,g, or c
  misc_feature (528): n equals a,t,g, or c
  misc_feature (530): n equals a,t,g, or c
  misc_feature (588): n equals a,t,g, or c
  misc_feature (641): n equals a,t,g, or c
  misc_feature (657): n equals a,t,g, or c
  misc_feature (676): n equals a,t,g, or c
  misc_feature (714): n equals a,t,g, or c
  misc_feature (730): n equals a,t,g, or c
  misc_feature (731): n equals a,t,g, or c
  misc_feature (744): n equals a,t,g, or c
gaaaaaaaaannaaaaaaaaaaaaaaaaaaaaaaaaaaaaaagggcggccgntntagaggatccaagcttacgtacgcgtgcatgcgacgtcatagctcttctatagtgtcacctaaattcaattcactggccgtcgttttacaacgtcgtgactgggaaaaccctggcgttacccaacttaatcgccttgcagcacatccccctttcgccagctggcgtaatagcgaagaggcccgcaccgatcgcccttcccaacagttgcncagcctgaatggcgaatgggacgcgccctgtancggcgcattaagcgcggcgggtgtggtggttacncgcagcgtgaccgttacacttgccagcgccctagcgcccgntcctttcgctttcttcccttcctttctcgccacgttcgccggctttccccgtcaagctntaaatcgggggctccctttagggttccgatttagtgctttacggcacctcgaccccaaaaaactngattagggtgatggttcacgtagtgggccatngncctgatagacggtttttcgccctttgacgttggagtccacgttcttaatagtggactnttgttccaaactggaacaacacttaaccctatctcgggctattcttttgattnataagggatttttccnatttcgggcctattggttnaaaaaatgaagcttgttttaacaaaaaatttaacgcgnaattttaccaaaaatnnttaaacggcttanaatttaagggggggccctt

SEQ ID NO: 314 - DNA, 761 bp, Homo sapiens
  misc_feature (76): n equals a,t,g, or c
  misc_feature (103): n equals a,t,g, or c
  misc_feature (109): n equals a,t,g, or c
  misc_feature (119): n equals a,t,g, or c
  misc_feature (126): n equals a,t,g, or c
  misc_feature (155): n equals a,t,g, or c
  misc_feature (225): n equals a,t,g, or c
  misc_feature (248): n equals a,t,g, or c
  misc_feature (251): n equals a,t,g, or c
  misc_feature (255): n equals a,t,g, or c
  misc_feature (257): n equals a,t,g, or c
  misc_feature (297): n equals a,t,g, or c
  misc_feature (339): n equals a,t,g, or c
  misc_feature (345): n equals a,t,g, or c
  misc_feature (367): n equals a,t,g, or c
  misc_feature (371): n equals a,t,g, or c
  misc_feature (386): n equals a,t,g, or c
  misc_feature (397): n equals a,t,g, or c
  misc_feature (437): n equals a,t,g, or c
  misc_feature (441): n equals a,t,g, or c
  misc_feature (447): n equals a,t,g, or c
  misc_feature (460): n equals a,t,g, or c
  misc_feature (467): n equals a,t,g, or c
  misc_feature (483): n equals a,t,g, or c
  misc_feature (510): n equals a,t,g, or c
  misc_feature (526): n equals a,t,g, or c
  misc_feature (527): n equals a,t,g, or c
  misc_feature (528): n equals a,t,g, or c
  misc_feature (535): n equals a,t,g, or c
  misc_feature (545): n equals a,t,g, or c
  misc_feature (557): n equals a,t,g, or c
  misc_feature (567): n equals a,t,g, or c
  misc_feature (581): n equals a,t,g, or c
  misc_feature (596): n equals a,t,g, or c
  misc_feature (611): n equals a,t,g, or c
  misc_feature (632): n equals a,t,g, or c
  misc_feature (644): n equals a,t,g, or c
  misc_feature (651): n equals a,t,g, or c
  misc_feature (653): n equals a,t,g, or c
  misc_feature (657): n equals a,t,g, or c
  misc_feature (660): n equals a,t,g, or c
  misc_feature (664): n equals a,t,g, or c
  misc_feature (675): n equals a,t,g, or c
  misc_feature (678): n equals a,t,g, or c
  misc_feature (692): n equals a,t,g, or c
  misc_feature (723): n equals a,t,g, or c
  misc_feature (744): n equals a,t,g, or c
  misc_feature (756): n equals a,t,g, or c
gcccacgcgtccgcccacgcgtccgaaaaaaaaaaaaaaaaaaaaaaaaaaaaaaaaaaaaaaaaaaaaaaagggnggccgctctaaaggatccaagcttacntacgcntgcatgcaangtcatanctctcctatagtgtcacctaaattcaatncactggccgtcgttttacaacgtcgtgactgggaaaaccctggcgttacccaacttaatcgccttgcaanacatccccctttcgccagctggngtnatancnaaaaggcccgcaccgatcgcccttcccaacagttgcgcancctgaatggcaaatgggacgcgccctgttacggcgcattaancccggngggtgtggtggttacccccaangttnaccgctacacttgcnagcgccctagngcccgctcctttcgctttcttcccttcctttctcgccaanttcngccggntttccccgtcaanctctaantcgggggcccctttanggttccaatttatgctttacggcaccncaacccaaaaaacttnnntaaggtnatggtccacntatgggccatcncctaataaanggttttcccccttngaaattggaatccanttcttaaaagggaanctgttccaaatggaaaaaaanccaaccctatcncgggctntncctnganttanaaagggaattnggncaattccggcctantgggtttaaaaaattgaaactgaatttaaanaaaaatttaaacgcaaaattntaaaaaaaattntttaa

SEQ ID NO: 315 - DNA, 540 bp, Homo sapiens
  misc_feature (40): n equals a,t,g, or c
  misc_feature (46): n equals a,t,g, or c
  misc_feature (47): n equals a,t,g, or c
  misc_feature (109): n equals a,t,g, or c
  misc_feature (252): n equals a,t,g, or c
  misc_feature (367): n equals a,t,g, or c
  misc_feature (376): n equals a,t,g, or c
  misc_feature (394): n equals a,t,g, or c
  misc_feature (422): n equals a,t,g, or c
  misc_feature (432): n equals a,t,g, or c
  misc_feature (478): n equals a,t,g, or c
  misc_feature (484): n equals a,t,g, or c
  misc_feature (488): n equals a,t,g, or c
  misc_feature (504): n equals a,t,g, or c
  misc_feature (528): n equals a,t,g, or c
gattttttataaaccacggttgcagccaaaaaaaaaaaanaaaaannaaaaaaaaaaaaaaaaagggcggccgctctagaggatccaagcttacgtacgcgtgcatgcnacgtcatagctcttctatagtgtcacctaaattcaattcactggccgtcgttttacaacgtcgtgactgggaaaaccctggcgttacccaacttaatcgccttgcagcacatccccctttcgccagctggcgtaatagcgaanaggcccgcaccgatcgcccttcccaacagttgcgcagcctgaatggcgaatgggacgcgccctgtagcggcgcattaagcgcggcgggtgtggtggttacgcgcagcgtgaccgntacacttgnaagcgccctaacgcccgntcctttcgctttcttcccttcctttctnccacgttcgnccggtttcccgtcaagctctaaatcgggggctcctttaagggtccnaattantggntttacgggaccttgancccaaaaaaacttgatttaggggngaagggttcacg

SEQ ID NO: 316 - DNA, 513 bp, Homo sapiens
  misc_feature (265): n equals a,t,g, or c
  misc_feature (420): n equals a,t,g, or c
  misc_feature (468): n equals a,t,g, or c
  misc_feature (478): n equals a,t,g, or c
  misc_feature (483): n equals a,t,g, or c
  misc_feature (496): n equals a,t,g, or c
gtctttctgttaatttccctctgcctaaagactacatgacagaaatgacctatcactacttattatttctgaagcctaactgcaagactgatttctgagaacaagtaaagaactggaatacttatttttcatataaaaatctaaatgtgttaataaatcatttcatacaaaagtacattattaaataaccacattattaaaataaaaaaaaaaaaaaaagggcggccgctctagaggatcccaagcttacgtacgcgtgcatgcnacgtcatagctcttctatagtgtcacctaaattcaattcactgggccgtcgttttacaacgtcggtgactgggaaaaccctggcgttacccaacttaatccgccttgcagcacatccccctttcgccagctggcgtaatagcgaagaggcccgcnccgatcgcccttcccaacagttgcgcatgctgaatggcgaatgggacncgccctgtancgggngcattaaagcgcngcgggtgtggtggttac

SEQ ID NO: 317 - DNA, 389 bp, Homo sapiens
  misc_feature (9): n equals a,t,g, or c
  misc_feature (31): n equals a,t,g, or c
  misc_feature (60): n equals a,t,g, or c
  misc_feature (70): n equals a,t,g, or c
  misc_feature (72): n equals a,t,g, or c
  misc_feature (75): n equals a,t,g, or c
  misc_feature (105): n equals a,t,g, or c
  misc_feature (111): n equals a,t,g, or c
  misc_feature (126): n equals a,t,g, or c
  misc_feature (248): n equals a,t,g, or c
  misc_feature (282): n equals a,t,g, or c
  misc_feature (296): n equals a,t,g, or c
  misc_feature (342): n equals a,t,g, or c
  misc_feature (349): n equals a,t,g, or c
  misc_feature (351): n equals a,t,g, or c
  misc_feature (357): n equals a,t,g, or c
gcccacgcntccgaaaaaaaaaaaaaaaaanaaaaaaaaaaaaaaaaaaaaaaaaaaaangggcggccgntntanaggatccaagcttacgtacgcgtgcatgcnacgtcntagctcttctatagngtcacctaaattcaattcactggccgtcgttttacaacgtcgtgactgggaaaaccctggcgttacccaacttaatcgccttgcagcacatccccctttcgccagctggcgtaatagcgaanaggcccgcaccgatcgcccttcccaacagttgcncagcctgaatggcnaatgggacgcgccctgtagcggcgcattaagcgcggcgggtgtggnggttacncncagcgngaccgttacacttgccagcgccctagcgcccg

SEQ ID NO: 318 - DNA, 388 bp, Homo sapiens
  misc_feature (1): n equals a,t,g, or c
  misc_feature (2): n equals a,t,g, or c
  misc_feature (3): n equals a,t,g, or c
  misc_feature (14): n equals a,t,g, or c
  misc_feature (143): n equals a,t,g, or c
  misc_feature (144): n equals a,t,g, or c
  misc_feature (146): n equals a,t,g, or c
  misc_feature (150): n equals a,t,g, or c
  misc_feature (154): n equals a,t,g, or c
  misc_feature (159): n equals a,t,g, or c
  misc_feature (160): n equals a,t,g, or c
  misc_feature (163): n equals a,t,g, or c
  misc_feature (168): n equals a,t,g, or c
  misc_feature (171): n equals a,t,g, or c
  misc_feature (174): n equals a,t,g, or c
  misc_feature (196): n equals a,t,g, or c
  misc_feature (198): n equals a,t,g, or c
  misc_feature (223): n equals a,t,g, or c
  misc_feature (226): n equals a,t,g, or c
  misc_feature (227): n equals a,t,g, or c
  misc_feature (234): n equals a,t,g, or c
  misc_feature (240): n equals a,t,g, or c
  misc_feature (242): n equals a,t,g, or c
  misc_feature (255): n equals a,t,g, or c
  misc_feature (280): n equals a,t,g, or c
  misc_feature (314): n equals a,t,g, or c
  misc_feature (359): n equals a,t,g, or c
  misc_feature (366): n equals a,t,g, or c
  misc_feature (368): n equals a,t,g, or c
  misc_feature (377): n equals a,t,g, or c
nnnatctctctggnggacccaatttacataggaaacagctatgaccatgattacgccaagctctaatacgactcactatagggaaagctggtacgcctgcaggtaccggtccggaattcccgggtcgacccacgcgtccggtnnanaccnatgnggggnnagntctcnggnggnaaggaaaatcgtgcaaagaggnantaatgaatgtggatcacgaggatanccnnttagtgnaggaantncatcgtttgggtntaaaaaatgctgatggaaagttaantgtgaaaattggggtcctctttcgtgatgataantgagccaacctctttgaagcattggtaggaactcttaaagctgtnaaacgananaagaatgtncatatccagga

SEQ ID NO: 319 - DNA, 418 bp, Homo sapiens
  misc_feature (235): n equals a,t,g, or c
  misc_feature (240): n equals a,t,g, or c
  misc_feature (285): n equals a,t,g, or c
  misc_feature (380): n equals a,t,g, or c
  misc_feature (391): n equals a,t,g, or c
  misc_feature (392): n equals a,t,g, or c
  misc_feature (396): n equals a,t,g, or c
  misc_feature (401): n equals a,t,g, or c
gatatttgttacttttagttctataagtgaggaagagtttatggcaaagatttttggcactttgttttcaagatggtgttatcttttgaattcttgataaatgactgtttttttctgcctaatagtaactggttaaaaaacaaatgttcatatttattgattaaaaatgtggttgcttaattcctaaaaaaaaaaaaaaaaaaaaaaaaaaaaaaaaaaaaaaaagggcggccgntctanaggatccaagcttacgtacgcgtgcatgcgacgtcatagctcttntatagtgtcacctaaattcaattcactggccgtcgttttacaacgtcgtgactgggaaaaccctggcgttacccaacttaatcgccttgcagcanatccccctttnnccanctggngaataccaaaaggcccg

SEQ ID NO: 320 - DNA, 684 bp, Homo sapiens
  misc_feature (11): n equals a,t,g, or c
  misc_feature (41): n equals a,t,g, or c
  misc_feature (71): n equals a,t,g, or c
  misc_feature (251): n equals a,t,g, or c
  misc_feature (570): n equals a,t,g, or c
  misc_feature (594): n equals a,t,g, or c
  misc_feature (596): n equals a,t,g, or c
  misc_feature (606): n equals a,t,g, or c
  misc_feature (670): n equals a,t,g, or c
  misc_feature (684): n equals a,t,g, or c
cgggaaattcncaaagctgtttccgcctgcaggtcccggtncggaattcccgggtcgacccacgcgtccgnatccccagtgtgaggttaatgagcaaaattggtctttggggccctttttgtccaagccccactgaaaggcctcttcagaaaactattatctttaaagccctactttaactccttaattccagcatacagctaaaactggatgtatattctggcaagtaaaggctgaggactcctctttantcctcagatctagataactcatgacattttatttgaccaacatagcacatgatgagatatcaaggtaattaaaatagcatgcttgaaaaaaaatacgtaatctgtttcacctgtaactgtttaagccaataaacttttcaaaatttaaaaaaaaaaaaaaagggcggccgctctagaggatccaagcttacgtacgcgtgcatgcgacgtcatagctcttctatagtgtcacctaaattcaattcactggccgtcgttttacaacgtcgtgactgggaaaaccctggcgttacccaacttaatcgccttgcagcacatncccctttcgcagctggcgtaatancnaagaggcccnaccgatcgccctttccaacagttgcgcagcctgaatggcgaatgggacgcgccctgtagccggncattaagcgccggn

SEQ ID NO: 321 - DNA, 216 bp, Homo sapiens
  misc_feature (2): n equals a,t,g, or c
  misc_feature (4): n equals a,t,g, or c
  misc_feature (10): n equals a,t,g, or c
  misc_feature (11): n equals a,t,g, or c
  misc_feature (25): n equals a,t,g, or c
  misc_feature (108): n equals a,t,g, or c
  misc_feature (155): n equals a,t,g, or c
  misc_feature (183): n equals a,t,g, or c
  misc_feature (190): n equals a,t,g, or c
  misc_feature (192): n equals a,t,g, or c
  misc_feature (202): n equals a,t,g, or c
cncnagaccnnctttggaaacgccngactatagggaaagctggtacgcctgcaggtaccggtccggaattcccgggtcgacccacgcgtccgcccggctggaggctgncagaaggatgctggggataagcccttaggcaccagcttagacacctncaagaaccaggccccgctgatgcaaganggcagancngatacccatnagagccccgagaat

SEQ ID NO: 322 - DNA, 557 bp, Homo sapiens
  misc_feature (40): n equals a,t,g, or c
  misc_feature (98): n equals a,t,g, or c
  misc_feature (286): n equals a,t,g, or c
  misc_feature (394): n equals a,t,g, or c
  misc_feature (415): n equals a,t,g, or c
  misc_feature (509): n equals a,t,g, or c
  misc_feature (545): n equals a,t,g, or c
  misc_feature (546): n equals a,t,g, or c
  misc_feature (550): n equals a,t,g, or c
  misc_feature (555): n equals a,t,g, or c
ggtccagaagcctccccgaccccccaagctatttgctcanattaacaaattaaagtgcctgaagcataattcatttttgtatctgtggtaacaaaacnttaaccaaaagattttctgtccagaagcctccccgaccccccaagctatttgctcacattaacaaattaaagtgcctgaagcataattcattctttacctgtatactaaaaaccctgttgtattgatttttttataataagcctttttacctctgtgtaaaaaatatatatacaagtgtatgatgtanattttagttcttaacttttttttatggtttctaatatgtatgaccaatgtagccattgctttaaaatgtaccgtgtaaatataaacacatcctatcagaaaaaaaaanaaaaaagggcggccgctctanaggatccaagcttacgtacgcgtgcatgcgacgtcatagctcttctatagtgtcacctaaattcaattcactggccgtcgttttacaacgtcgngactgggaaaaaccctgggcgttacccaacttaatnnggcnttgcngg

SEQ ID NO: 323 - DNA, 145 bp, Homo sapiens
  misc_feature (5): n equals a,t,g, or c
  misc_feature (7): n equals a,t,g, or c
  misc_feature (15): n equals a,t,g, or c
  misc_feature (19): n equals a,t,g, or c
  misc_feature (56): n equals a,t,g, or c
  misc_feature (139): n equals a,t,g, or c
  misc_feature (140): n equals a,t,g, or c
  misc_feature (142): n equals a,t,g, or c
  misc_feature (145): n equals a,t,g, or c
ggtancngcagtacngtcngaattcccggctctagagatccaagcttacgtactgngcatgcacgtcatagctcttctatagtgtcacctaaattcaattcactggccgtcgttttacaacgtcgtgactgggaaaacnntntan

SEQ ID NO: 324 - DNA, 353 bp, Homo sapiens
  misc_feature (1): n equals a,t,g, or c
  misc_feature (2): n equals a,t,g, or c
  misc_feature (3): n equals a,t,g, or c
  misc_feature (28): n equals a,t,g, or c
  misc_feature (43): n equals a,t,g, or c
  misc_feature (110): n equals a,t,g, or c
  misc_feature (133): n equals a,t,g, or c
  misc_feature (146): n equals a,t,g, or c
  misc_feature (216): n equals a,t,g, or c
  misc_feature (219): n equals a,t,g, or c
  misc_feature (225): n equals a,t,g, or c
  misc_feature (232): n equals a,t,g, or c
  misc_feature (235): n equals a,t,g, or c
  misc_feature (263): n equals a,t,g, or c
  misc_feature (332): n equals a,t,g, or c
  misc_feature (334): n equals a,t,g, or c
  misc_feature (349): n equals a,t,g, or c
  misc_feature (353): n equals a,t,g, or c
nnnattcatcatagccaccatcaccctncttaacctctacttntacctacgcctaatctactccacctcaatcacactactccccatatctagcaacgtaaaaataaaangacagtttgaacatacaaaaccnaccccattcctcnccacactcatcgcccttaccacgctactcctacctatctccccctttatactaataatcttataaaaaanaanaaaaangggcggncgntctagaggatccaagcttacgtacgcgngcatgcgacgtcatagctcttctatagggtcacctaaattcaattcactggccgtcgttttacaacgtngngactgggaaaacccnggcn

SEQ ID NO: 325 - DNA, 553 bp, Homo sapiens
  misc_feature (359): n equals a,t,g, or c
  misc_feature (381): n equals a,t,g, or c
  misc_feature (406): n equals a,t,g, or c
  misc_feature (448): n equals a,t,g, or c
  misc_feature (461): n equals a,t,g, or c
  misc_feature (481): n equals a,t,g, or c
  misc_feature (513): n equals a,t,g, or c
  misc_feature (524): n equals a,t,g, or c
ggcacgaggacaaagccttgctctgttccccaggctggagtgcattggtgcaatcatggctcactgcagtctcaaccttccggactcaagtgatggtcccgcttcagctacttgggaggctgaggcaggagaatcgcttgaacccgggaggcggaggttgcggggagccgggattgtgccactgcactccaccctagagtgagactccctctcaaaaaaaaaaaaaaaaaactcgagggggggcccggtacccaattcgccctatagtgagtcgtattacaattccactggccgtcgttttacaacgtcgtgactgggaaaaccctgggcgttacccaacttaaatcgccttgcagcanatcccctttcgccagctgggtnaattagcgaagaggcccgcaccgantcgccttcccaacagttgcgcagtggaatggcgaatggcaantgtaagcttaaantttgtttaaaattcgcgttnaaatttttggttaaatcagctcattttttaancataaggccgnaatcgggaaaatcccttattaaatccaaa

SEQ ID NO: 326 - DNA, 628 bp, Homo sapiens
  misc_feature (3): n equals a,t,g, or c
  misc_feature (7): n equals a,t,g, or c
  misc_feature (434): n equals a,t,g, or c
  misc_feature (435): n equals a,t,g, or c
  misc_feature (437): n equals a,t,g, or c
  misc_feature (464): n equals a,t,g, or c
  misc_feature (592): n equals a,t,g, or c
  misc_feature (602): n equals a,t,g, or c
  misc_feature (613): n equals a,t,g, or c
  misc_feature (622): n equals a,t,g, or c
  misc_feature (625): n equals a,t,g, or c
gcntgcntccaagtccataggtcctgcctcttcaatcctggctttctagggcctgggatgatcattgctagaactgagagaccagcctggctagaacttcagggcgttccattcattctttcagtaaatgtttgcagcacatgtgttacatgtcaggcagtgaaaccccccacagcagccttccctctcagaggatacatttgtaaccattacacagtcatcagaggaataattttttttaatcaccagtgtgcacacagtcatggagttgggtattcccagctaccagggaggctgaggtgggaggattgcttgatgccaggagttagggaatatagtgcaccgtgattggacttgcgaatagccactgcactgcggcctggacgacgtagtgataccctgactcttataaataaataaatgaataaacacannanaaaaaaaaaagggcggccgctctagangatccaagcttacgtacgccgtgcatgcgacgtcataactcttctataggggcacctaaattcaattcactggcccgccgtttacaacgtctgactgggaaaaccctggcgttacccaacttaatcgncttgcagaanatccccttttnccaactggnggnata

SEQ ID NO: 327 - DNA, 416 bp, Homo sapiens
  misc_feature (22): n equals a,t,g, or c
  misc_feature (254): n equals a,t,g, or c
  misc_feature (258): n equals a,t,g, or c
  misc_feature (260): n equals a,t,g, or c
  misc_feature (265): n equals a,t,g, or c
  misc_feature (285): n equals a,t,g, or c
  misc_feature (297): n equals a,t,g, or c
  misc_feature (299): n equals a,t,g, or c
  misc_feature (300): n equals a,t,g, or c
  misc_feature (305): n equals a,t,g, or c
  misc_feature (334): n equals a,t,g, or c
  misc_feature (349): n equals a,t,g, or c
  misc_feature (416): n equals a,t,g, or c
gatgactgatgttattatacantatggtaaatacaaagttgtagtattatggttcttgatggtgtgatttacttatgtaaattatgtacaaatttaagttcaatgaaacactgatttaatgtactgaaaggtaaatagtaccatagtgaattattttctgtcttgccttaggtttatttttattatcttcaatattagaataaatgctaaattattttcaaaaaaaaaaaaaaaaaaaaaaaaaaaaaaagggnggangntctanaggatccaagcttacgtacncgtgcatgcaangnnatagntcttctatagtgtcacctaaattcaattnactggccgtcgattnacaacgtcgtgactgggaaaaccctggcgttacccaacttaatcgccttgcagcacatccccctttn

SEQ ID NO: 328 - DNA, 629 bp, Homo sapiens
  misc_feature (227): n equals a,t,g, or c
  misc_feature (228): n equals a,t,g, or c
  misc_feature (229): n equals a,t,g, or c
  misc_feature (233): n equals a,t,g, or c
  misc_feature (242): n equals a,t,g, or c
  misc_feature (243): n equals a,t,g, or c
  misc_feature (244): n equals a,t,g, or c
  misc_feature (257): n equals a,t,g, or c
  misc_feature (271): n equals a,t,g, or c
  misc_feature (275): n equals a,t,g, or c
  misc_feature (284): n equals a,t,g, or c
  misc_feature (301): n equals a,t,g, or c
  misc_feature (394): n equals a,t,g, or c
  misc_feature (469): n equals a,t,g, or c
  misc_feature (484): n equals a,t,g, or c
  misc_feature (512): n equals a,t,g, or c
  misc_feature (544): n equals a,t,g, or c
  misc_feature (554): n equals a,t,g, or c
  misc_feature (573): n equals a,t,g, or c
  misc_feature (598): n equals a,t,g, or c
  misc_feature (619): n equals a,t,g, or c
ttttttttttttttttcggcgctgccgtatcgttccgcctgggcgggattctgacttagaggcgttcagtcataatcccacagatggtagcttcgccccattggctcctcagccaagcacatacaccaaatgtctgaacctgcggttcctctcgtactgagcaggattaccatggcaacaacacatcatcagtagggtaaaactaacctgtctcacgacggtctaannnaaanaaaaaaaannnaaaaaagaattcnaaaagcttctcganagtncttctaaancggccgcgggcccatcnattttccacccgggtggggtaccaggtaagtgtacccaattcgccctatagtgagtcgtattacaattcactggccgtcgttttacaacgtcntgactgggaaaaccctggcgttacccaacttaatcgccttgcagcacatccccctttcgccagctggcgtaatancgaaaaaggccgcancgatcgcccttcccaacagtttgcgcancctgaaatggcgaatggaaatcaatttttaantgtttaatgntgttaaactactgaatccnaattgtttggtgttttttaaaatcncagtcccaagggtcatttcanggccctcaat

SEQ ID NO: 329 - DNA, 458 bp, Homo sapiens
  misc_feature (4): n equals a,t,g, or c
  misc_feature (20): n equals a,t,g, or c
  misc_feature (31): n equals a,t,g, or c
  misc_feature (86): n equals a,t,g, or c
  misc_feature (96): n equals a,t,g, or c
  misc_feature (194): n equals a,t,g, or c
  misc_feature (226): n equals a,t,g, or c
  misc_feature (238): n equals a,t,g, or c
  misc_feature (262): n equals a,t,g, or c
  misc_feature (267): n equals a,t,g, or c
  misc_feature (277): n equals a,t,g, or c
  misc_feature (280): n equals a,t,g, or c
  misc_feature (285): n equals a,t,g, or c
  misc_feature (295): n equals a,t,g, or c
  misc_feature (332): n equals a,t,g, or c
  misc_feature (333): n equals a,t,g, or c
  misc_feature (339): n equals a,t,g, or c
  misc_feature (346): n equals a,t,g, or c
  misc_feature (352): n equals a,t,g, or c
  misc_feature (356): n equals a,t,g, or c
  misc_feature (372): n equals a,t,g, or c
  misc_feature (380): n equals a,t,g, or c
  misc_feature (405): n equals a,t,g, or c
  misc_feature (414): n equals a,t,g, or c
  misc_feature (452): n equals a,t,g, or c
aatntaaaaaaaaaaaaaanaaaaaaaaaanaaaaaaaaaagggcggccgctctaaaggatccaagcttacgtacgcgtgcatgcnacgtcatagntctgctatagtgtcacctaaattcaattcactggccgtcgttttacaacgtcgtgactgggaaaaccctggcgttacccaacttaatcgccttgcagnacatccccctttcgccagatggcgtaatagcnaaaaggcccgcnccgatcgcccttcccaacagttgngcagnctgaatggcnaangggangcgccctgtngcggcgcattaagcgcggcgggtgtggtggttacgcnnagggtnaccgctncacttnccancgccctagcgcccggncctttcgntttcttcccttcctttctcgccacnttcgccggntttccccgtcaagctctaaatcggggggtcccttttanggttcc

SEQ ID NO: 330 - DNA, 453 bp, Homo sapiens
  misc_feature (78): n equals a,t,g, or c
  misc_feature (83): n equals a,t,g, or c
  misc_feature (113): n equals a,t,g, or c
  misc_feature (134): n equals a,t,g, or c
  misc_feature (323): n equals a,t,g, or c
  misc_feature (327): n equals a,t,g, or c
  misc_feature (391): n equals a,t,g, or c
  misc_feature (418): n equals a,t,g, or c
  misc_feature (427): n equals a,t,g, or c
  misc_feature (428): n equals a,t,g, or c
  misc_feature (453): n equals a,t,g, or c
gcccctataccttctgcataatgaattaacaaaaaaaaaaaaaaaaaaaaaaaaaaaaaaaaaaaaaagggcggccgntctanaggatccaagcttacgtacgcgtgcatgcnacgtcatagctcttctatagngtcacctaaattcaattcactggccgtcgttttacaacgtcgtgactgggaaaaccctggcgttacccaacttaatcgccttgcagcacatccccctttcgccagctggcgtaatagcgaaaaggcccgcaccgatcgcccttcccaacagttgcgcagcctgaatggcgaatgggacgcgccctgtancggngcattaagcgcggcgggtgtggtggttacgcgcagcgtgaccgttacacttgccagcgccctancgcccgctcctttcgtttcttcccttnctttctcgnnacgttcgccggtttccccgttaagn

SEQ ID NO: 331 - DNA, 498 bp, Homo sapiens
  misc_feature (356): n equals a,t,g, or c
  misc_feature (361): n equals a,t,g, or c
  misc_feature (381): n equals a,t,g, or c
  misc_feature (393): n equals a,t,g, or c
  misc_feature (424): n equals a,t,g, or c
  misc_feature (433): n equals a,t,g, or c
  misc_feature (452): n equals a,t,g, or c
  misc_feature (469): n equals a,t,g, or c
  misc_feature (483): n equals a,t,g, or c
gagaaagctgactaatccaaagggcaaggtggtttaccttaaagaaaaaaaaaaaaaaagggcggccgctctagaggatccaagcttacgtacgcgtgcatgcgacgtcatagctcttctatagtgtcacctaaattcaattcactggccgtcgttttacaacgtcgtgactgggaaaaccctggcgttacccaacttaatcgccttgcagcacatccccctttcgccagctggcgtaatagcgaagaggcccgcaccgatcgcccttcccaacagttgcgcagcctgaatggcgaatgggacgcgccctgtacggcgcattaagcgcggcgggtgtggtggttacgcccagcgtnaccgntacacttgccagcgccctancgccccgctccntttcgctttctttccctttccttttcttggncacgtttcnccgggtttttcccccgttnaaagccttttaaaatcngggggggcttcccntttaaaggggttccc

SEQ ID NO: 332 - DNA, 450 bp, Homo sapiens
  misc_feature (278): n equals a,t,g, or c
  misc_feature (317): n equals a,t,g, or c
  misc_feature (328): n equals a,t,g, or c
  misc_feature (335): n equals a,t,g, or c
  misc_feature (338): n equals a,t,g, or c
  misc_feature (347): n equals a,t,g, or c
  misc_feature (353): n equals a,t,g, or c
  misc_feature (358): n equals a,t,g, or c
  misc_feature (368): n equals a,t,g, or c
  misc_feature (373): n equals a,t,g, or c
  misc_feature (374): n equals a,t,g, or c
  misc_feature (377): n equals a,t,g, or c
  misc_feature (378): n equals a,t,g, or c
  misc_feature (384): n equals a,t,g, or c
  misc_feature (386): n equals a,t,g, or c
  misc_feature (392): n equals a,t,g, or c
  misc_feature (395): n equals a,t,g, or c
  misc_feature (397): n equals a,t,g, or c
  misc_feature (415): n equals a,t,g, or c
  misc_feature (417): n equals a,t,g, or c
  misc_feature (426): n equals a,t,g, or c
  misc_feature (428): n equals a,t,g, or c
  misc_feature (430): n equals a,t,g, or c
  misc_feature (446): n equals a,t,g, or c
aattcggcagaggtactcctggcttatcaatggaacattccagcaaagcacacaagagctctttatccctaacatcactgtgaataatagtggatcctatacctgccacgccaataactcagtcactggctgcaacagggccacagtcaagacgatgcatagtcactgagctaagtccagtagtagcaaagccccaaatcaaagccagcaagaccacagtcacaggagattaaggactctgtggaacctggacctggttccacaaaatggacactggnatcttccatcccgttggttctttcaaaaaaccaggggtnttcccgtcctnggggggnttngaaggtttntccccnggggnaaaaaaccanccttnnggnnttaaancncttttnaangngggggggttttttgggangngttttgggntntnggggtttttaaacccntttg

SEQ ID NO: 333 - DNA, 434 bp, Homo sapiens
  misc_feature (2): n equals a,t,g, or c
  misc_feature (58): n equals a,t,g, or c
  misc_feature (119): n equals a,t,g, or c
  misc_feature (195): n equals a,t,g, or c
  misc_feature (214): n equals a,t,g, or c
  misc_feature (218): n equals a,t,g, or c
  misc_feature (269): n equals a,t,g, or c
  misc_feature (291): n equals a,t,g, or c
  misc_feature (296): n equals a,t,g, or c
  misc_feature (316): n equals a,t,g, or c
  misc_feature (333): n equals a,t,g, or c
  misc_feature (337): n equals a,t,g, or c
  misc_feature (382): n equals a,t,g, or c
  misc_feature (399): n equals a,t,g, or c
  misc_feature (405): n equals a,t,g, or c
  misc_feature (425): n equals a,t,g, or c
gntgaacgtaaactataatgctctaccacaagaaaatggcctctcacctggggccatngctggcattgtgattggagtagtggccctggttgctctgatagcagtagccctggcatgtnttctgcatttcgggaagaccggcagctcaggaccactccaatgacccacctaacaagatgaatgaagttacttatnctaccctgaactttgaagnccancaacccacacaaccaacttcagcctccccatccctaacagccacagaaatnatttattccagaagtaaaaaancagtnatgaaacctggtcctgctcnctgcagtgcctgatgtntttncaagtctctcaccccccatcactaggaaattcctttcccctgttngggtaaagggtgggganagaaancaatttctcctactctcctncctatagga

SEQ ID NO: 334 - DNA, 612 bp, Homo sapiens
  misc_feature (365): n equals a,t,g, or c
  misc_feature (437): n equals a,t,g, or c
  misc_feature (455): n equals a,t,g, or c
  misc_feature (474): n equals a,t,g, or c
  misc_feature (482): n equals a,t,g, or c
  misc_feature (493): n equals a,t,g, or c
  misc_feature (497): n equals a,t,g, or c
  misc_feature (525): n equals a,t,g, or c
  misc_feature (540): n equals a,t,g, or c
  misc_feature (565): n equals a,t,g, or c
  misc_feature (583): n equals a,t,g, or c
  misc_feature (606): n equals a,t,g, or c
ggtctagccacaacagggtcaatgctcgccttgcaggtgcccccagcgaggacccccagttccccaaggtgcagtggccaccccgtgaactttgttctgcctgccacaatgaacgcctggatgtgcccgtgtgggacgtggaagccaccctcaacttcctcaaggcccacttctccccaagcaacatcatcctggacttccctgcagctgggtcaacttgcccgagggatgtgcagaatgtggcaagccgccccaaactggcgatgggagccctggagctggaaagccggaattcaactctggaccctgggaagcctgagatgatgaagtcccccacaaacaccaccccacatgtgccggctganggacctgaggcaagtcgacccccgaagcttgcaccctggcctaaaacttgaccaggccaggaaccctctgancacaatggcaaaagcttnaaaggaatgaaccaggaancaagccgntttgggcaatngggnactttgagccaaagccgaagaacaccanggggcttggatttgntttggctttaatttccaaggggttnaaaaaaaaaaacccggcnttttttggggggccccctttttnggaagg

SEQ ID NO: 335 - DNA, 462 bp, Homo sapiens
  misc_feature (287): n equals a,t,g, or c
  misc_feature (337): n equals a,t,g, or c
  misc_feature (358): n equals a,t,g, or c
  misc_feature (373): n equals a,t,g, or c
  misc_feature (428): n equals a,t,g, or c
  misc_feature (456): n equals a,t,g, or c
gcccacgcgtccgcatgtttccaggaggggccatgggggtcagggtggttttgagagagcagggtaaggaaggaatgtgctagaagtgctcctagtttcttgtaaaggaagccagagttgacagtacaaagggtcgtggccagccctgcagcttcagcacctgccccacccagagtgggagtcaggtggagccacctgctgggctcccccagaactttgcacacatcttgctatgtattagccgatgtctttagtgttgagcctctggattctggggtctgggccantggccatagtgaaacctgggaatgaatggtacttgaacatctgggcttgncagccacaaggaaaggccaancccatgtaccccaancattcttgccaacccttgctctgggcattcccggaagggtcgatccttaggcttngctttaaaagcccttgcccttgcctttntcttgg

SEQ ID NO: 336 - DNA, 336 bp, Homo sapiens
  misc_feature (170): n equals a,t,g, or c
  misc_feature (175): n equals a,t,g, or c
  misc_feature (177): n equals a,t,g, or c
  misc_feature (183): n equals a,t,g, or c
  misc_feature (196): n equals a,t,g, or c
  misc_feature (204): n equals a,t,g, or c
  misc_feature (208): n equals a,t,g, or c
  misc_feature (230): n equals a,t,g, or c
  misc_feature (262): n equals a,t,g, or c
  misc_feature (275): n equals a,t,g, or c
  misc_feature (293): n equals a,t,g, or c
  misc_feature (318): n equals a,t,g, or c
  misc_feature (335): n equals a,t,g, or c
  misc_feature (336): n equals a,t,g, or c
gcagattttgatcgttttaaagttatgaaggcaaagaaaatgaggaacagaataatcaagaatgaattaagaagcttcaaaaggcagctctcctgaaagcttctcccaaaaaacacctggtactaagggtactgctgctgctgctgctgctgctgctgctgctgctaaantccancnaaaaanatcaccgcccganttaaaagntccncccaaaagtcctgcccaaaaancccaggccaaaaacacgctgctccaaactcanaggtcaaaactcncccaaaaccctctccaangctctgcaaaaagcttattgcatcntaaaattataaggtctnn

SEQ ID NO: 337 - DNA, 303 bp, Homo sapiens
  misc_feature (21): n equals a,t,g, or c
  misc_feature (25): n equals a,t,g, or c
  misc_feature (28): n equals a,t,g, or c
  misc_feature (37): n equals a,t,g, or c
  misc_feature (49): n equals a,t,g, or c
  misc_feature (50): n equals a,t,g, or c
  misc_feature (51): n equals a,t,g, or c
  misc_feature (64): n equals a,t,g, or c
  misc_feature (66): n equals a,t,g, or c
  misc_feature (67): n equals a,t,g, or c
  misc_feature (70): n equals a,t,g, or c
  misc_feature (120): n equals a,t,g, or c
  misc_feature (168): n equals a,t,g, or c
  misc_feature (189): n equals a,t,g, or c
  misc_feature (190): n equals a,t,g, or c
  misc_feature (192): n equals a,t,g, or c
  misc_feature (223): n equals a,t,g, or c
  misc_feature (249): n equals a,t,g, or c
  misc_feature (256): n equals a,t,g, or c
  misc_feature (257): n equals a,t,g, or c
  misc_feature (267): n equals a,t,g, or c
agacaatccttaccatgtganaggnggnatgactgtnatggcatgagannngcatcactatganannganaactcagtagaagataatggcaagtccagactggggatatgatgacaaanatggtcctgaacaatggagcaagctgtatcccattgccaatggaaatnaccagtcccctgttgatattnngnccagtgaaaccaaacatgacacctctctganacctattagtgtctcctacaacccanccacagnnaaagaaattntccaatgtgggggcattccttccatgtaaatttttg

SEQ ID NO: 338 - DNA, 460 bp, Homo sapiens
  misc_feature (13): n equals a,t,g, or c
  misc_feature (315): n equals a,t,g, or c
  misc_feature (409): n equals a,t,g, or c
  misc_feature (423): n equals a,t,g, or c
  misc_feature (424): n equals a,t,g, or c
  misc_feature (433): n equals a,t,g, or c
  misc_feature (454): n equals a,t,g, or c
gatttaaggcatntcctgcatgcacagttgcagttagttattccaggtattatttttgttttcagaaaaagaaaactcagtagaagataatggcaagtccagactggggatatgatgacaaaaatggtcctgaacaatggagcaagctgtatcccattgccaatggaaataaccagtcccctgttgatattaaaaccagtgaaaccaaacatgacacctctctgaaacctattagtgtctcctacaacccagccacagccaaagaaattatcaatgtggggcattccttccatgtaaattttgaggacaacgatnaccgatcaagtgctgaaaggtggtcctttctctgacagctcaggctctttcagttccattttcactggggcagtcaaaatgagcatgggttaanaacattccagtggnntgggagtcnaaatattctggccgagctttnacgtaa

SEQ ID NO: 339 - DNA, 416 bp, Homo sapiens
  misc_feature (30): n equals a,t,g, or c
  misc_feature (33): n equals a,t,g, or c
  misc_feature (42): n equals a,t,g, or c
  misc_feature (51): n equals a,t,g, or c
  misc_feature (126): n equals a,t,g, or c
  misc_feature (137): n equals a,t,g, or c
  misc_feature (147): n equals a,t,g, or c
  misc_feature (161): n equals a,t,g, or c
  misc_feature (173): n equals a,t,g, or c
  misc_feature (258): n equals a,t,g, or c
  misc_feature (267): n equals a,t,g, or c
  misc_feature (268): n equals a,t,g, or c
  misc_feature (378): n equals a,t,g, or c
  misc_feature (403): n equals a,t,g, or c
  misc_feature (407): n equals a,t,g, or c
  misc_feature (411): n equals a,t,g, or c
  misc_feature (415): n equals a,t,g, or c
ggtgccgattcctgccctgccccgaccgcnagncggaccatntcccatcantgggggtacggcaaacacaacggacctaagcactggcataaggacttccccattgccaagggaagagcgccagtncccctgttganatcgacactncatacagccaagtntgaacccttccntgaaagcccctgtttgtttcctatgaatcaagcaacttccctgaggatcctcaacaatggtcatgctttcaacgtgggagtttgnatgactctnnaggacaaagcagtgcttcaagggaaggacccctgggttgggcactttacagattggttttcattttttcaattttcaatgggggtttcaatttgatgggacaaggtttcngaggcataattgtgggttaaaaagnaatntggntgcng

SEQ ID NO: 340 - DNA, 362 bp, Homo sapiens
  misc_feature (5): n equals a,t,g, or c
  misc_feature (76): n equals a,t,g, or c
  misc_feature (117): n equals a,t,g, or c
  misc_feature (136): n equals a,t,g, or c
  misc_feature (170): n equals a,t,g, or c
  misc_feature (201): n equals a,t,g, or c
  misc_feature (204): n equals a,t,g, or c
  misc_feature (233): n equals a,t,g, or c
  misc_feature (310): n equals a,t,g, or c
  misc_feature (331): n equals a,t,g, or c
  misc_feature (332): n equals a,t,g, or c
  misc_feature (335): n equals a,t,g, or c
  misc_feature (338): n equals a,t,g, or c
  misc_feature (339): n equals a,t,g, or c
  misc_feature (357): n equals a,t,g, or c
ggcanagtgaatgttgctggagaacaaggccagcatttttggaggaggactgcctgccccataccaggtcaaacanttgcacctgcactggtccgacttgccatataagggctcggngcacagcctcgaatggggngcactttgccatgggagatgcacatagtacatgngaaaagagaaggggacatcgaggaatgtganaanagggcccaggaaccctgaagacgaaattncggtgctgggcctttttggtgggaggctgggaacccaggtgaaacgagggctttccagccactggtgggaggcactntcttaatattccccaaacctnnggntgnngcattacgattggcaganaggca

SEQ ID NO: 341 - DNA, 328 bp, Homo sapiens
  misc_feature (63): n equals a,t,g, or c
  misc_feature (98): n equals a,t,g, or c
  misc_feature (152): n equals a,t,g, or c
  misc_feature (171): n equals a,t,g, or c
  misc_feature (184): n equals a,t,g, or c
  misc_feature (186): n equals a,t,g, or c
  misc_feature (195): n equals a,t,g, or c
  misc_feature (276): n equals a,t,g, or c
  misc_feature (280): n equals a,t,g, or c
  misc_feature (303): n equals a,t,g, or c
  misc_feature (311): n equals a,t,g, or c
  misc_feature (325): n equals a,t,g, or c
aagcctttcaagatgatccccggagtggtggatggggtcttcctgcccaggcacccccagganctgctggcctctgccgactttcagcctgtccctancattgttggtgtcaacaacaatgaattcggctggctcatccccaaggtcatgangatctatgatacccagaangaaatggacaganangcctcccangctgctctgcagaaaatgttaacgctgctgatttgcctcctacatttggtgacctgctgaaggaagaattcatttgggganaatngggatccccaaaacccccaaacncatttccnggaaaataattgcngaa

SEQ ID NO: 342 - DNA, 140 bp, Homo sapiens
  misc_feature (3): n equals a,t,g, or c
  misc_feature (11): n equals a,t,g, or c
  misc_feature (33): n equals a,t,g, or c
  misc_feature (70): n equals a,t,g, or c
  misc_feature (73): n equals a,t,g, or c
  misc_feature (129): n equals a,t,g, or c
  misc_feature (130): n equals a,t,g, or c
  misc_feature (140): n equals a,t,g, or c
aangggacttnccagtgatgcacccaagagctntttatccccaacatcactgtgaataataggggatccnatncgtgccaagcccataactctacactggccttaataggagcacagtcacgaatatcnnagtctatgcn

SEQ ID NO: 343 - DNA, 477 bp, Homo sapiens
  misc_feature (396): n equals a,t,g, or c
  misc_feature (421): n equals a,t,g, or c
  misc_feature (435): n equals a,t,g, or c
  misc_feature (459): n equals a,t,g, or c
  misc_feature (463): n equals a,t,g, or c
gggacagcagagctgacagtcacagcagccctgacaagagagttcctggagcccaagctcttctccacagaggacaagcaggcagcagagaccatggggtccccttcagcctgtccatacagagtgtgcattccctggcaggggctcctgctcacagcctcgcttttaaccttctggaacctgccaaacagtgcccagaccaatattgatgtcgtgccgttcaatgtcgcagaagggaaggaggtccttctagtagtccataatgagtcccagaatctttatggctacaactggtacaaaggggaaagggtgcatgccaactatcgaattataggatattgtaaaaaatataagtcaagaaaatgcccaaggcccgacacaacgtcgagagacatntacccaatggaaccttgtgttccanacgtaccacatgcncaggatttttcctcactataaaanaaanttggatgagaatac

SEQ ID NO: 344 - DNA, 389 bp, Homo sapiens
  misc_feature (1): n equals a,t,g, or c
  misc_feature (2): n equals a,t,g, or c
  misc_feature (3): n equals a,t,g, or c
  misc_feature (4): n equals a,t,g, or c
  misc_feature (5): n equals a,t,g, or c
  misc_feature (6): n equals a,t,g, or c
  misc_feature (7): n equals a,t,g, or c
  misc_feature (8): n equals a,t,g, or c
  misc_feature (9): n equals a,t,g, or c
  misc_feature (11): n equals a,t,g, or c
  misc_feature (19): n equals a,t,g, or c
  misc_feature (21): n equals a,t,g, or c
  misc_feature (22): n equals a,t,g, or c
  misc_feature (32): n equals a,t,g, or c
  misc_feature (35): n equals a,t,g, or c
  misc_feature (144): n equals a,t,g, or c
  misc_feature (145): n equals a,t,g, or c
  misc_feature (159): n equals a,t,g, or c
  misc_feature (201): n equals a,t,g, or c
  misc_feature (379): n equals a,t,g, or c
nnnnnnnnntntcgcacgncnngccagccaanccntcactaaagggaacaaaagctggagctccaccgcggtgcgaccgctctagaactagtggatcccccgggctgcaggaattcggcacgaggccggccggggctggcacgnncgccgcggcggggnctggaggcgcgaccgggcgcccccgagcgggaatcagaacgncgccgaggggaccagatcaacgccagcaagaacgaggaggacgcgggaaaaatgttcgttggtggcctgagctgggatactagcaaaaaagatttaaaagactattttactaaatttggagaggtcgttgactgtacaataaaaatggatcccaacactggacggtcaagagggtttnggtttatcct

SEQ ID NO: 345 - DNA, 152 bp, Homo sapiens
  misc_feature (11): n equals a,t,g, or c
  misc_feature (34): n equals a,t,g, or c
  misc_feature (42): n equals a,t,g, or c
  misc_feature (48): n equals a,t,g, or c
  misc_feature (61): n equals a,t,g, or c
  misc_feature (64): n equals a,t,g, or c
  misc_feature (84): n equals a,t,g, or c
  misc_feature (87): n equals a,t,g, or c
  misc_feature (122): n equals a,t,g, or c
tcgacccacgngtccggggcgcaccatggcccgnggggctgngctggngctgctgctcttnggnctgctgggtgttctggtcgncgncccggatggtggtttcgatttatccgatgcccttnctgacaatgaaaacaagaaacccactgcaa

SEQ ID NO: 346 - DNA, 634 bp, Homo sapiens
  misc_feature (2): n equals a,t,g, or c
  misc_feature (32): n equals a,t,g, or c
  misc_feature (38): n equals a,t,g, or c
  misc_feature (284): n equals a,t,g, or c
  misc_feature (491): n equals a,t,g, or c
  misc_feature (586): n equals a,t,g, or c
  misc_feature (588): n equals a,t,g, or c
  misc_feature (598): n equals a,t,g, or c
  misc_feature (613): n equals a,t,g, or c
  misc_feature (621): n equals a,t,g, or c
tntgtctgaatgtaaatcaccttctgagccgntgattnccaagagggttggtcttattcacatatcccaagtcatctcagaaattgatggtaacaggatgaccttgagccaagaaggagcacaagattccttccctcttcagcagaagatcttggtttgctctttgatgctcttgatcaggcagttgaaaatcaaagaggtcactctggggaagttatatgaagcctacagtaaagtctgtcgcaaacagcaggtggcggctgtggaccagtcagagtgtttgncactttcagggctcttggaagccaggggcattttaggattaaagagaaacaaggaaacccgtttgacaaaggtgtttttcaagattgaagagaaagaaatagaacatgctctgaaagataaagctttaattggaaatatcttagctactggattgccttaaattcttctcttacaccccacccgaaagtattcaagctggcatttanagagctacaggcttcattttaaggctttacacattcgggcctgaaaacaaatatgaccttttttacttgaagccaatgaattttaatctatagancnttaaaattancacagaataatatcnttggggcntactattttaccc

SEQ ID NO: 347 - DNA, 363 bp, Homo sapiens
  misc_feature (228): n equals a,t,g, or c
  misc_feature (233): n equals a,t,g, or c
  misc_feature (242): n equals a,t,g, or c
  misc_feature (268): n equals a,t,g, or c
  misc_feature (319): n equals a,t,g, or c
  misc_feature (322): n equals a,t,g, or c
  misc_feature (323): n equals a,t,g, or c
  misc_feature (324): n equals a,t,g, or c
  misc_feature (325): n equals a,t,g, or c
  misc_feature (328): n equals a,t,g, or c
ggcacgagaggaatatggagaggctgactcttgcttgtggtggggtggccctgaattcttttgaggacctaagtcctgactgcttgggacatgcaggacttgtatatgagtatacattgggagaagttcacctttattgagaagtgtaacaaccctcgttctatcacattattgatcaaaggaccaaataagcccacacttagatcaaagatgcagtaaagggatggncttgnagggctgtncaaaaatgctgttgatgatggctgtntggttccgggtgctggtgctgtggaagtggcaatggcagaagccctggatnaannnnaantccatgtaaagggcaaggcacagttggggtccagc

SEQ ID NO: 348 - DNA, 388 bp, Homo sapiens
  misc_feature (205): n equals a,t,g, or c
  misc_feature (339): n equals a,t,g, or c
  misc_feature (344): n equals a,t,g, or c
  misc_feature (364): n equals a,t,g, or c
  misc_feature (382): n equals a,t,g, or c
aattcggcacgagctgaaggctagcaaaccgagcgatcatgtcgcacaaacaaatttactattcggacaaatacgacgacgaggagtttgagtatcggttagtgctggcgcgggagcaatagcgagggtcgtgagctttggccgctgagggcacaaggaattagtaacaggaactgaggcgatagaattggcgcatgcgtatganacatgtcatgctgcccaaggacatagccaagctggtccctaaaacccatctgatgtctgaatctgaatggaggaatcttggcgttcagcagagtcagggatgggtccattatatgatccatgaaccagaacctnaaatnttgctgttccggggccattnccaggaaccaaggaattnagtttc

SEQ ID NO: 349 - DNA, 194 bp, Homo sapiens
  misc_feature (38): n equals a,t,g, or c
  misc_feature (51): n equals a,t,g, or c
  misc_feature (57): n equals a,t,g, or c
  misc_feature (60): n equals a,t,g, or c
  misc_feature (67): n equals a,t,g, or c
  misc_feature (69): n equals a,t,g, or c
  misc_feature (74): n equals a,t,g, or c
  misc_feature (83): n equals a,t,g, or c
  misc_feature (91): n equals a,t,g, or c
  misc_feature (124): n equals a,t,g, or c
  misc_feature (127): n equals a,t,g, or c
  misc_feature (140): n equals a,t,g, or c
  misc_feature (180): n equals a,t,g, or c
  misc_feature (191): n equals a,t,g, or c
gagttgttgcctgggctggacgtggttttgtctgctgngcccgctcttagngctctngtntaatttnangcagngcgccagcnggatggtncacaagcagatatactactcggacaagtacttngangaacactacgagnaccgggatggtatgttacccagagaacttgacaaacaagnacctaaaactnatc

SEQ ID NO: 350 - DNA, 524 bp, Homo sapiens
  misc_feature (9): n equals a,t,g, or c
  misc_feature (11): n equals a,t,g, or c
  misc_feature (14): n equals a,t,g, or c
  misc_feature (17): n equals a,t,g, or c
  misc_feature (29): n equals a,t,g, or c
  misc_feature (85): n equals a,t,g, or c
  misc_feature (98): n equals a,t,g, or c
  misc_feature (101): n equals a,t,g, or c
  misc_feature (148): n equals a,t,g, or c
  misc_feature (240): n equals a,t,g, or c
  misc_feature (258): n equals a,t,g, or c
  misc_feature (484): n equals a,t,g, or c
ttaaccttntnaanggnacaaagtctggntctccaccaggtggaggaccgctcctagcaactagtgggtcccccgggcctgcagnaattcggcagtgncgnaaagccctacggcgtcactgcaatgtgctggaactgggagcaagtgncagcggctggacggcatcctgagtcgagaccattccgattcacgggcgcggcaacttccccacgctcgagctgcagccgagcctgtatcgtnaaggtggtgcggcggcgncttgccgagaagcgcatcggcgtccgcgacgtgcgcctcaacggctcggcagccagccatgtcctgcaccaggacagcggcctgggctacaaggacctggacctcatcttctgcgccgacctgcgcggggaaggggagtttcagactgtgaaggacgtcgtgctggactgcctgttggacttcttacccgagggggtgaacaaagagaagatcacaccactcacgntcaaggaagcttatgtgcagaaaatggttaaagtgtgcaa

SEQ ID NO: 351 - DNA, 352 bp, Homo sapiens
  misc_feature (21): n equals a,t,g, or c
  misc_feature (261): n equals a,t,g, or c
  misc_feature (291): n equals a,t,g, or c
  misc_feature (295): n equals a,t,g, or c
  misc_feature (328): n equals a,t,g, or c
  misc_feature (348): n equals a,t,g, or c
gccaaatcctttgaatactgngccaggatttttaagcaacactttatggacagcagaataccttgcttaatcgtagctgcaaagtcagacctgcatgaagttaaacaagaatacagtatttcacctactgatttctgcaggaaacacaaaatgcctccaccacaagccttcacttgcaatactgctgatgcccccagtaaggatatctttggtaaattgacaacaatggccatgtatccccatgcccggttacgctgtatntgcacctgcaacaggtgtacattttgcatntgtnaaaacttcctcaacttatactttgctgcaaatntggtaaaagaacaaaaatcntttc

SEQ ID NO: 352 - DNA, 632 bp, Homo sapiens
  misc_feature (3): n equals a,t,g, or c
  misc_feature (4): n equals a,t,g, or c
  misc_feature (8): n equals a,t,g, or c
agnnaganaccaaccctcactaaagggaacaaaagctggagctccaccgcggtgcggccgctctagaactagtggatcccccgggctgcaggaattcggcacgaggtgtgtcagaacaatcttgaatcatgaagctactaaccagagccggctctttctcgagattttattccctcaaagttgcccccaaagttaaagccacagctgcgcctgcaggagcaccgccacaacctcaggaccttgagtttaccaagttaccaaatggcttggtgattgcttctttggaaaactattctcctgtatcaagaattggtttgttcattaaagcaggcagtagatatgaggacttcagcaatttaggaaccacccatttgctgcgtcttacatccagtctgacgacaaaaggagcttcatctttcaagataacccgtggaattgaagcagttggtggcaaattaagtgtgaccgcaacaagggaaaacatggcttatactgtggaatgcctgcggggtgatgttgatattctaatggagttcctgctcaatgtcaccacagcaccagaatttcgtcgttgggaagtagctgaccttcagcctcagctaaagattgacaaagctgtggcctttcagaat

SEQ ID NO: 353 - DNA, 440 bp, Homo sapiens
  misc_feature (435): n equals a,t,g, or c
ctttaactccaccattagcacccaaagctaagattctaatttaaactattctctgttctttcatggggaagcagatttgggtaccacccaagtattgactcacccatcaacaaccgctatgtatttcgtacattactgccagccaccatgaatattgtacggtaccataaatacttgaccacctgtagtacataaaaacccaatccacatcaaaaccccctccccatgcttacaagcaagtacagcaatcaaccctcaactatcacacatcaactgcaactccaaagccacccctcacccactaggataccaacaaacctacccacccttaacagtacatagtacataaagccatttaccgtacatagcacattacagtcaaatcccttctcgtccccatggatgacccccctcagataggggtcccttgaccancatcc

SEQ ID NO: 354 - DNA, 609 bp, Homo sapiens
  misc_feature (3): n equals a,t,g, or c
  misc_feature (5): n equals a,t,g, or c
  misc_feature (8): n equals a,t,g, or c
  misc_feature (11): n equals a,t,g, or c
  misc_feature (139): n equals a,t,g, or c
aancnganacnaaccctcactaaagggaacaaaagctggagctccaccgcggtgcggccgctctagaactagtggatcccccgggctgcaggaattcggcacgagccggagggtgtgtgttgggcaaagccggaggagnaggaggacgattgttttacggatcccgtgatcggcccgtccttctcccctttcccccctccctaccgcccctgtcccgccggggagcggcggcggccttggactttgctgtctttcctcgcggagacagatttcaacactacacttgcacaatgtctttgaaaccaagagtagtagattttgatgaaacatggaacaaacttttgacgacaataaaagccgtggtcatgttggaatacgtcgaaagagcaacatggaatgaccgtttctcagatatctatgctttatgtgtggcctatcctgaaccccttggagaaagactttatacagaaactaagatttttttggaaaatcatgttcggcatttgcataagagagttttggagtcagaagaacaagtacttgttatgtatcataggtactgggaagaatacagcaagggtgcagactatatggactgcttatataggt

SEQ ID NO: 355 - DNA, 466 bp, Homo sapiens
  misc_feature (348): n equals a,t,g, or c
  misc_feature (368): n equals a,t,g, or c
  misc_feature (450): n equals a,t,g, or c
  misc_feature (451): n equals a,t,g, or c
gctccattattgatcggttcatgcagaataattgtgtgcccaagaagatgctgcagctggttggtgtcactgccatgtttattgcaagcaaatatgaagaaatgtaccctccagaaattggtgactttgcttttgtgactgacaacacttatactaagcaccaaatcagacagatggaaatgaagattctaagagctttaaactttggtctgggtcggcctctacctttgcacttccttcggagagcatctaagattggagaggttgatgtcgagcagcatactttggccaaatacctgatggaactaactatgttggactatgacatggtgcactttcctccttctnaaattgcagcaggagctttntgcttagcactgaaaattctgggataatggtgaatggttatgcagcacctggctaagaatgtagtcatgggtaaatcaaggnnttacaaagcacatgc

SEQ ID NO: 356 - DNA, 447 bp, Homo sapiens
  misc_feature (269): n equals a,t,g, or c
  misc_feature (375): n equals a,t,g, or c
  misc_feature (380): n equals a,t,g, or c
  misc_feature (436): n equals a,t,g, or c
  misc_feature (440): n equals a,t,g, or c
  misc_feature (446): n equals a,t,g, or c
ggtgatgaggaggcttgtccagaggacaagggaccccaggacccacaggcactggcgctggacacccagatccctgcaacccctggacccaaacccctggtccgcaccagccgggagccagggaaggacgtcacgacctcagggtactcctccgtcagcaccgcaagtcccacaagctccgtggacggtggcttgggggccctgccccaacctacctcagtgctgtccctggacagtgactcgcacacacagccctgccaccatcaggncaggaagtcatgtttacagtgtcgtcccccaagtcccccggagagcagtgttccccagcaacaggtgaagcggataaactatgcatacacagtgaagaggaggacntgaanctgggcttgtgaagctgtaagtgtgtcagcacatttgcgcagtggattttactgangggntgaagng

SEQ ID NO: 357 - DNA, 510 bp, Homo sapiens
  misc_feature (2): n equals a,t,g, or c
  misc_feature (453): n equals a,t,g, or c
  misc_feature (486): n equals a,t,g, or c
  misc_feature (491): n equals a,t,g, or c
  misc_feature (496): n equals a,t,g, or c
  misc_feature (500): n equals a,t,g, or c
tnccacgcgtccgcccacgcgtccgcccacgcgtccgcagattccctccgtcgccgccaagatgatgtgcggggcgccctccgccacgcagccggccaccgccgagacccagcacatcgccgaccaggtgaggtcccagcttgaagagaaagaaaacaagaagttccctgtgtttaaggccgtgtcattcaagagccaggtggtcgcggggacaaactacttcatcaaggtgcacgtcggcgacgaggacttcgtacacctgcgagtgttccaatctctccctcatgaaaacaagcccttgaccttatctaactaccagaccaacaaagccaagcatgatgagctgacctatttctgatcctgactttggacaaggcccttcagccagaagactgacaaagtcatcctccgtctaccagagcgtgcacttgtgatcctaaaataagcttcatntccgggctgtgccccttggggtggaaggggcangattntgcanctgnttttgcattt

SEQ ID NO: 358 - DNA, 240 bp, Homo sapiens
ggtcttgcactcatgagctgtccccacattaggcttaaaaacagatgcaattcccggacgtctaaaccaaaccactttcaccgctacacgaccgggggtatactacggtcaatgctctgaaatctgtggagcaaaccacagtttcatgcccatcgtcctagaattaattcccctaaaaatctttgaaatagggcccgtatttaccctatagcaccccctctacctcctctagagccaaaa

SEQ ID NO: 359 - DNA, 340 bp, Homo sapiens
  misc_feature (320): n equals a,t,g, or c
  misc_feature (331): n equals a,t,g, or c
  misc_feature (334): n equals a,t,g, or c
  misc_feature (335): n equals a,t,g, or c
  misc_feature (338): n equals a,t,g, or c
ggcacgagctcataaggaaatctacccctatgtcatccaggaacttagaccaactttaaatgaactgggaatctccactccggaggaactgggccttgacaaagtgtaaaccgcatggatgggcttccccaaggatttattgacattgctacttgagtgtgaacagttacctggaaatactgatgataacatattaccttatttgaacaagttttcctttattgagtaccaagccatgtaatggtaacttggactttaataaaaaggaaatgagtttgaaccggaaaaaaaaaaaaaaaaaaaaaaaaaaaaaagaaaanaaagaaggganagnnaanaa

SEQ ID NO: 360 - DNA, 501 bp, Homo sapiens
  misc_feature (147): n equals a,t,g, or c
  misc_feature (148): n equals a,t,g, or c
  misc_feature (192): n equals a,t,g, or c
  misc_feature (242): n equals a,t,g, or c
  misc_feature (244): n equals a,t,g, or c
  misc_feature (348): n equals a,t,g, or c
  misc_feature (364): n equals a,t,g, or c
  misc_feature (384): n equals a,t,g, or c
  misc_feature (455): n equals a,t,g, or c
  misc_feature (465): n equals a,t,g, or c
  misc_feature (469): n equals a,t,g, or c
  misc_feature (474): n equals a,t,g, or c
  misc_feature (491): n equals a,t,g, or c
cccacgcgtccgcccacgcgtccgatgcctatcatatagtaaaacccagcccatgacccctaacaggggccctctcagccctcctaatgacctccggcctagccatgtgatttcacttccactccataaagctcctcatactaaggnntactaaccaacacactaaccatataccaatgatggcgcgatgtnacacgaagaaagcacataccaagggcaccacacaccacctgtccaaaaangncttcgatacgggataatcctatttattacctcagaagtttttttcttcgcaggattttctgagcttttacactccagcctagccctacccccaactaagaaggnactggccccaacaagnatcacccgctaaatccctanaatccactcctaaacactccgtatatcgatcaggatatcatcactgactcacatatctaatagaaaaaacngaaacaatantcancatgnttattaaatttatggtntctatttacc

SEQ ID NO: 361 - DNA, 393 bp, Homo sapiens
  misc_feature (357): n equals a,t,g, or c
  misc_feature (359): n equals a,t,g, or c
  misc_feature (364): n equals a,t,g, or c
  misc_feature (367): n equals a,t,g, or c
  misc_feature (390): n equals a,t,g, or c
gccccattattcctagaaccaggcgacctgcgactccttgacgttgacaatcgagtagtactcccgattgaagcccccattcgtataataattacatcacaagacgtcttgcactcatgagctgtccccacattaggcttaaaaacagatgcaattcccggacgtctaaaccaaaccactttcaccgctacacgaccgggggtatactacggtcaatgctctgaaatctgtggagcaaaccacagtttcatgcccatcgtcctagaattaattcccctaaaaatctttgaaatagggcccgtatttaccctatagcaccccctctaccccctctagagccaaaaaaaaaaaaaaagntncaagnttnaaaaaactgaaaatcagaaaagnttt

SEQ ID NO: 362 - DNA, 664 bp, Homo sapiens
  misc_feature (308): n equals a,t,g, or c
  misc_feature (535): n equals a,t,g, or c
  misc_feature (551): n equals a,t,g, or c
  misc_feature (567): n equals a,t,g, or c
  misc_feature (642): n equals a,t,g, or c
  misc_feature (660): n equals a,t,g, or c
  misc_feature (662): n equals a,t,g, or c
gagtaggtctacaagacgctacttcccctatcatagaagagcttatcacctttcatgatcacgccctcataatcattttccttatctgcttcctagtcctgtatgcccttttcctaacactcacaacaaaactaactaatactaacatctcagacgctcaggaaatagaaaccgtctgaactatcctgcccgcatcatcctagtcctcatcgccctcccatccctacgcatcctttacataacagacgaggtcaacgatccctcccttaccatcaaatcaattggccaccaatggtactgaacctacnaagtacaccgactacggcggactaatcttcaactcctacatacttccccattattcctagaaccaggcgacctgcgactccttgacgttgacaatcgagtagtactcccgattgaagcccccattcgtataataattacatcacaagacgtcttgcactcatgagctgtccccacattaggcttaaaaacagatgcaattccccgacgtctaaaccaaaccactttnaccggtacacgaaccnggggtattactacggncaatgctctgaaatctggggagcaaaaccacaggttcatgcccatcgtcctagaaataaattcccctaaaaatcnttgaaaaaaggggcccgnantt

SEQ ID NO: 363 - DNA, 595 bp, Homo sapiens
  misc_feature (466): n equals a,t,g, or c
  misc_feature (467): n equals a,t,g, or c
  misc_feature (485): n equals a,t,g, or c
  misc_feature (515): n equals a,t,g, or c
  misc_feature (552): n equals a,t,g, or c
  misc_feature (557): n equals a,t,g, or c
  misc_feature (559): n equals a,t,g, or c
  misc_feature (568): n equals a,t,g, or c
gcgcaagtaggtctacaagacgctacttcccctatcatagaagagcttatcacctttcatgatcacgccctcataatcattttccttatctgcttcctagtcctgtatgcccttttcctaacactcacaacaaaactaactaatactaacatctcagacgctcaggaaatagaaaccgtctgaactatcctgcccgccatcatcctagtcctcatcgccctcccatccctacgcatcctttacataacagacgaggtcaacgatccctcccttaccatcaaatcaattggccaccaatggtactgaacctacgagtacaccgactacggcggactaatcttcaactcctacatacttcccccattattcctagaaccaggcgacctgcgactccttgacgtttgacaatcgagtagtactcccgattgaagcccccattcgtataataattacatcacaagacgtnnttgcactcatgagctgtncccacattaagcttaaaaacagatgcattnccggacgtctaaaccaaaccactttcaccgatacacnaaccngngggtatacnaccggtcaatgcttctgaaatcttgtg

SEQ ID NO: 364 - DNA, 441 bp, Homo sapiens
acaagacgctacttcccctatcatagaagagcttatcacctttcatgatcacgccctcataatcattttccttatctgcttcctagtcctgtatgcccttttcctaacactcacaacaaaactaactaatactaacatctcagacgctcaggaaatagaaaccgtctgaactatcctgcccgccatcatcctagtcctcatcgccctcccatccctacgcatcctttacataacagacgaggtcaacgatccctccctttaccatcaaatcaattgggccaccaatggtactgaacctacgagtacaccgactacggcggactaatcttcaactcctacatacttcccccattattcctagaaccaggcgacctgcgactccttgacgttgacaatcgagtagtactcccgattgaagcccccattcgtataataattaac

SEQ ID NO: 365 - DNA, 367 bp, Homo sapiens
  misc_feature (347): n equals a,t,g, or c
  misc_feature (362): n equals a,t,g, or c
  misc_feature (363): n equals a,t,g, or c
  misc_feature (366): n equals a,t,g, or c
  misc_feature (367): n equals a,t,g, or c
catacttcccccattattcctagaaccaggcgacctgcgactccttgacgttgacaatcgagtagtactcccgattgaagcccccattcgtataataattacatcacaagacgtcttgcactcatgagctgtccccacattaggcttaaaaacagatgcaattcccggacgtctaaaccaaaccactttcaccgctacacgaccgggggtatactacggtcaatgctctgaaatctgtggagcaaaccacagtttcatgcccatcgtcctagaattaattcccctaaaaatctttggaaatagggcccgtatttaccctatagcaccccctctaccccctctagagncaaaaaaaaaaaaannagnn

SEQ ID NO: 366 - DNA, 460 bp, Homo sapiens
  misc_feature (51): n equals a,t,g, or c
  misc_feature (154): n equals a,t,g, or c
  misc_feature (211): n equals a,t,g, or c
  misc_feature (322): n equals a,t,g, or c
  misc_feature (336): n equals a,t,g, or c
  misc_feature (340): n equals a,t,g, or c
  misc_feature (355): n equals a,t,g, or c
  misc_feature (356): n equals a,t,g, or c
  misc_feature (378): n equals a,t,g, or c
  misc_feature (411): n equals a,t,g, or c
  misc_feature (413): n equals a,t,g, or c
  misc_feature (415): n equals a,t,g, or c
  misc_feature (453): n equals a,t,g, or c
ttttcgaggccaacgatccctcccttaccatcaaatcaattggccaccaanggtaccgaacctacgagtacaccgactacggcggactaatcttcaactcctacatacttcccccattattcctagaaccaggcgacctgcgactccttgacgntgacaatcgagtagtactcccgattgaaacccccattcggataataattacatacanggacgtcttgcactcatgagctgccccacattaggcttaaaaacagatgcaattcccggacgtctaaaccaaaccactatcaccgctacacgaccgggggtatactacggncaatgctctgaaanctgnggagcaaaccacagnntcatgcccatcggcctagaatnaattcccctaaaaatctttgaaatagggcccgnantnaccctatagcaccccctctaccccctctagagccaaanaaaaaaa

SEQ ID NO: 367 - DNA, 610 bp, Homo sapiens
  misc_feature (6): n equals a,t,g, or c
  misc_feature (13): n equals a,t,g, or c
gcaagntgacacnaaccctcactaaagggaacaaaagctggagctccaccgcggtgcggccgctctagaactagtggatcccccgggctgcaggaattcggcacgagggaatggcggcttccatctctgaggcgagcgacgctatggatcccacagtggtttgctaagaaggccattttcaactctccactggaggctgctatggcgttccctcacctgcagcagcccagctttctactggctagcctgaaagctgactctataaataagccctttgcacagcagtgccaagacttggttaaagtcattgaggactttccagcaaagtctgaaccaatcagagtccttgtgactggagcagctggtcaaattgcatattcactgctgtacagtattggaaatggatctgtctttggtaaagatcagatgtcatcgcaacagataaagaagacgttgccttcaaagacctgggatgtggccattcttgtgggctccatgccaagaagggaaggcatggagagaaaagatttactgaaagcaaatgtgaaaatcttcaaatcccagggtgcagccttagataaatacggcaagaagtcagttaaaggttatt

SEQ ID NO: 368 - DNA, 548 bp, Homo sapiens
  misc_feature (370): n equals a,t,g, or c
  misc_feature (378): n equals a,t,g, or c
  misc_feature (384): n equals a,t,g, or c
  misc_feature (412): n equals a,t,g, or c
  misc_feature (429): n equals a,t,g, or c
  misc_feature (449): n equals a,t,g, or c
  misc_feature (471): n equals a,t,g, or c
  misc_feature (490): n equals a,t,g, or c
  misc_feature (495): n equals a,t,g, or c
  misc_feature (528): n equals a,t,g, or c
ggcacgaggagcactctatttattgtactgtgaataatgatgaaggagagtggagtggcccaccacctgaatgcagaggaaaatctctaacttccaaggtcccaccaacagttcagaaacctaccacagtaaatgttccaactacagaagtctcaccaacttctcagaaaaccaccacaaaaaccaccacaccaaatgctcaaggtacagagactccatcagttcttcaaaaacacaccacagaaaatgtttcagctacaagaaccccaccaactcctcagaaacccaccacagtaaatgtcccagctacaatagtcacaccaacacctcagaaacccaccacattaatgttccagttacaggagtctcntcaacacntcaagncacacctagtaatgtttcagttacaggncctaccacttttcggancccaccggggcaatgttcgncaccattcccgcgcgttcggcntttctttcaaaaccttttncaagnccttttgcgttagatcctgtggcatgttttgtncacggcccttacggccaggt

SEQ ID NO: 369 - DNA, 538 bp, Homo sapiens
  misc_feature (12): n equals a,t,g, or c
  misc_feature (423): n equals a,t,g, or c
  misc_feature (449): n equals a,t,g, or c
  misc_feature (466): n equals a,t,g, or c
  misc_feature (521): n equals a,t,g, or c
  misc_feature (531): n equals a,t,g, or c
  misc_feature (538): n equals a,t,g, or c
gatggcgcgganccgggacgcgcgtacgccctgctgcttctcctgatctgctttaacgttggaagtggacttcacttacaggtcttaagcacaagaaatgaaaataagctgcttcctaaacatcctcatttagtgcggcaaaagcgcgcctggatcaccgcccccgtggctcttcgggagggagaggatctgtccaagaagaatccaattgccaagatacattctgatcttgcagaagaaagaggactcaaaattacttacaaatacactggaaaagggattacagagccaccttttggtatatttgtctttaacaaagatactggagaactgaatgttaccagcattcttgatcgagaagaaacaccattttttctgctaacaggtttacgctttggatgcaagagggaacaatgtagaganaccctttagagctacgcattaagggntcttgatatccaattgncaacggaaccagtggttcacacagggatgtctttgttggggcctgttgaagagtngaggtgcagnacatacn

SEQ ID NO: 370 - DNA, 538 bp, Homo sapiens
  misc_feature (401): n equals a,t,g, or c
  misc_feature (492): n equals a,t,g, or c
  misc_feature (500): n equals a,t,g, or c
  misc_feature (536): n equals a,t,g, or c
gagctcagtccccatcccgaagcacagggcaggacgtcgcggcggagtggggaagcgaggagtccgtggccgggagcttggaggctgagtttgagaaagctgcagaggaggttaggcaccttaagaccaagccatcggatgaggagatgctgttcatctatggccactacaaacaagcaactgtgggcgacataaatacagaacggcccgggatgttggacttcacgggcaaggccaagtgggatgcctggaatgagctgaaagggacttccaaggaagatgccatgaaagcttacatcaacaaagtagaagagctaaagaaaaaatacgggatatgagagactggatttggttactgtgccatgtgtttatcctaaactgagacaatgccttgttttttnctaataccgtggatggtgggaatccgggaaaataaccagttaaaccagctactcaaggctgctcaccatacggctctaacagattaggggntaaaacgnttactgacttccttgagtagttttacctgaaaccantt

SEQ ID NO: 371 - DNA, 224 bp, Homo sapiens
  misc_feature (21): n equals a,t,g, or c
  misc_feature (26): n equals a,t,g, or c
  misc_feature (48): n equals a,t,g, or c
  misc_feature (59): n equals a,t,g, or c
  misc_feature (68): n equals a,t,g, or c
  misc_feature (90): n equals a,t,g, or c
  misc_feature (108): n equals a,t,g, or c
  misc_feature (113): n equals a,t,g, or c
  misc_feature (123): n equals a,t,g, or c
  misc_feature (141): n equals a,t,g, or c
  misc_feature (171): n equals a,t,g, or c
  misc_feature (192): n equals a,t,g, or c
  misc_feature (204): n equals a,t,g, or c
  misc_feature (215): n equals a,t,g, or c
gcctgtgcctacacaccaccntcgcngaaagctgtgcagcgcattgcngagtctcaccngcagtctancagcaatttgaatgagaaccangcctcagaggaggaggangagcngggggagctncgggagctgggttatccnagagaggaagatgaggaggaagaggaggangatgaagaagaggaagactangaggacagccangctgaagaccngagcggaga

SEQ ID NO: 372 - DNA, 459 bp, Homo sapiens
  misc_feature (6): n equals a,t,g, or c
  misc_feature (52): n equals a,t,g, or c
  misc_feature (90): n equals a,t,g, or c
  misc_feature (105): n equals a,t,g, or c
  misc_feature (139): n equals a,t,g, or c
  misc_feature (140): n equals a,t,g, or c
  misc_feature (176): n equals a,t,g, or c
  misc_feature (208): n equals a,t,g, or c
  misc_feature (328): n equals a,t,g, or c
  misc_feature (394): n equals a,t,g, or c
  misc_feature (429): n equals a,t,g, or c
aacttncccaatgccgaactgggaggcccctttaaccagatgaacggagtgnccggaaatggcatgaacaacattgacatgactggaganaagaagtcgttgganctcccatatcccagcagctttgctcccgtctctnnacctagaaaccagaccttcacttacatgggcaagtnctccattgaccctcagtaccctggtgccagcngctacccagaaggcataatcaatattgtgagtgcaggcatcttgcaaggggtcacttccccagcttcaaccacagcctcatccagcgtcacctctgcctcccccaacccactggccacangacccctgggtgtgtgcaccatgtcccagacccagcctgacctggaccacctgtactctccgccancgcctcctcctccttattctggctgtgcaggaganctctaccaggacccttctgcgttcctgtta

SEQ ID NO: 373 - DNA, 422 bp, Homo sapiens
  misc_feature (27): n equals a,t,g, or c
  misc_feature (47): n equals a,t,g, or c
  misc_feature (60): n equals a,t,g, or c
  misc_feature (66): n equals a,t,g, or c
  misc_feature (70): n equals a,t,g, or c
  misc_feature (78): n equals a,t,g, or c
  misc_feature (87): n equals a,t,g, or c
  misc_feature (105): n equals a,t,g, or c
  misc_feature (267): n equals a,t,g, or c
  misc_feature (331): n equals a,t,g, or c
  misc_feature (351): n equals a,t,g, or c
  misc_feature (359): n equals a,t,g, or c
  misc_feature (393): n equals a,t,g, or c
  misc_feature (401): n equals a,t,g, or c
ggcagacctgaggcccatccccaaggngcccagccgtagcttcaggntctccgccagggnccctcncggntgcttctngtttttaanacttccagatcgatcctntcctcggtaccgtgggctttgggtctggcctccacgggtgggccttcaccctgaaagcagtttgccgagaatgtatgtgagccaagttcgccgccaagggggagggccagttgggagcctgccgagcgggccaagaaagtagaggacatgatgaagaagctntggggtgacaggtgagccccggggaatatggtgggggattcctgaaaactgggggtagtggcancaacgtaggggcgtggtgtnctattcanaattggttcaagcccacaagttttgcccaaaatnttcccttngggaccaacttcccaagtaat

SEQ ID NO: 374 - DNA, 342 bp, Homo sapiens
  misc_feature (4): n equals a,t,g, or c
  misc_feature (16): n equals a,t,g, or c
  misc_feature (17): n equals a,t,g, or c
  misc_feature (20): n equals a,t,g, or c
  misc_feature (24): n equals a,t,g, or c
  misc_feature (292): n equals a,t,g, or c
  misc_feature (301): n equals a,t,g, or c
  misc_feature (305): n equals a,t,g, or c
  misc_feature (325): n equals a,t,g, or c
  misc_feature (332): n equals a,t,g, or c
gcanaacatcagcgcnnacngganataaaaagattatccacagagcattccagtgtatcagagtatcatccagccgatggctatgcgttcagtagcaacatttacacaagaggatcccacctggaccaaggggaagctgctgttgcttttaagccaacttctaatcgccatattagattgaaattatgaaccactccaaaacacaacccaagaaatatgcccaatcccagttatgactttgtttgccaggggaaacaacagttgagctctccgggttccttaaggaatgatntttttaganaatnccttgaaatgaatcggaaancatggtngaaaaagttt

SEQ ID NO: 375 - DNA, 387 bp, Homo sapiens
  misc_feature (19): n equals a,t,g, or c
  misc_feature (162): n equals a,t,g, or c
  misc_feature (305): n equals a,t,g, or c
  misc_feature (335): n equals a,t,g, or c
  misc_feature (365): n equals a,t,g, or c
  misc_feature (366): n equals a,t,g, or c
  misc_feature (374): n equals a,t,g, or c
ggcagagctctgcgcgcantccgcttgactcagctcaccgagattctgtcagggggtgtttatattgagaagaacgataagctttgtcacatggacacaattgactggagggacatcgtgagggaccgagatgctgagatagtggtgaaggacaatggcagnaagctgtcccccctgtcatgaggtttgcaaggggcgatgctggggtcctggatcagaagactgccagacattgaccaagaccatctgtgcttcctcagtgtaattggtcactgctttggggcccaaccccaaccagtggttgncatgatgagtgtggccgggggttgtttcanggccccttcagggacacagactgtttttgnntggccggnatttcaatggaca

SEQ ID NO: 376 - DNA, 492 bp, Homo sapiens
  misc_feature (110): n equals a,t,g, or c
  misc_feature (203): n equals a,t,g, or c
  misc_feature (318): n equals a,t,g, or c
  misc_feature (333): n equals a,t,g, or c
  misc_feature (336): n equals a,t,g, or c
  misc_feature (405): n equals a,t,g, or c
  misc_feature (416): n equals a,t,g, or c
  misc_feature (440): n equals a,t,g, or c
  misc_feature (444): n equals a,t,g, or c
  misc_feature (448): n equals a,t,g, or c
ggcacgagaagcaaactcaaagcatttgggtcaaaacatcctgattgttttatacatggtttggatgataaattcagtaaagatacaggcataatccttatatgcaaatnagttgatgggtattttctatggtgatttcagacaaggaacctgcaggtcactctggaagatggttacattgaattgagcaccagcgatagggncggcccaatttttaaatctccacagacgtatatggatggtttactgcattatgtatctgtaataagcgacaactctgggtgagtcgaataaatacttctgtcagagctgtgagtngagttttactctctnttngttttaatggaattttctggtgtctttttgcaaaaaatttgtccttgattaccaaaaatactttcactnataagtcttgnccttctttccttttttcccatatncaantttncttcataaaaaaaataaacttgccacacatgggtgggcttcatt

SEQ ID NO: 377 - DNA, 336 bp, Homo sapiens
  misc_feature (4): n equals a,t,g, or c
  misc_feature (15): n equals a,t,g, or c
  misc_feature (36): n equals a,t,g, or c
  misc_feature (66): n equals a,t,g, or c
  misc_feature (70): n equals a,t,g, or c
  misc_feature (116): n equals a,t,g, or c
  misc_feature (163): n equals a,t,g, or c
  misc_feature (197): n equals a,t,g, or c
  misc_feature (227): n equals a,t,g, or c
  misc_feature (229): n equals a,t,g, or c
  misc_feature (231): n equals a,t,g, or c
  misc_feature (249): n equals a,t,g, or c
  misc_feature (280): n equals a,t,g, or c
  misc_feature (292): n equals a,t,g, or c
  misc_feature (308): n equals a,t,g, or c
  misc_feature (325): n equals a,t,g, or c
gacngtaccgtcccnaatcccgggtcgacccacgcntccgaagcagcagttagcccgccgcccgcntgtntgtccccagagccatggagagagccagtctgatccagaaggccaanctggcagagcaggccgaacgctatgaggacatggcagccttcatganaggcgccgtggagaagggcgaggagtctcctgcnaagagcgaaacctgctctcagtagcctatnanancgtggtgggcggccaganggctgcctggagggtgctgtccagtattgancagaaaagcaangaggaggggttcgganaggagaaggggcccgangtgcgttgaat

SEQ ID NO: 378 - DNA, 488 bp, Homo sapiens
  misc_feature (2): n equals a,t,g, or c
  misc_feature (9): n equals a,t,g, or c
  misc_feature (20): n equals a,t,g, or c
  misc_feature (35): n equals a,t,g, or c
  misc_feature (43): n equals a,t,g, or c
cngtcagtnacggtaccggnaattcccgggtgcgnacccacgncgtgccgccgagaccgctgccttgctcggaagggggcgagcggctgctgcccacccagaagcagcccgggggcggccaggtcaactccagccgctacaagacggagctgtgccgcccctttgaggaaaacggtgcctgtaagtacggggacaagtgccagttcgcacacggcatccacgagctccgcagcctgacccgccaccccaagtacaagacggagctgtgccgcaccttccacaccatcggcttttgcccctacgggccccgctgccacttcatccacaacgctgaagagcgccgtgccctggccggggcccgggacctctccgctgaccgtccccgcctccagcatagctttagtttgctgggtttcccagtgccgctgccaccgccgctgccaccgggctgctggacagcccacgtccatcaacccaacccctatttt

SEQ ID NO: 379 - DNA, 398 bp, Homo sapiens
  misc_feature (46): n equals a,t,g, or c
  misc_feature (124): n equals a,t,g, or c
  misc_feature (344): n equals a,t,g, or c
  misc_feature (384): n equals a,t,g, or c
  misc_feature (385): n equals a,t,g, or c
  misc_feature (386): n equals a,t,g, or c
  misc_feature (394): n equals a,t,g, or c
ggcacgagggggcctcccgctgtggccacctctgccgcggccgcgncgccgcgtcctaccctgccctccgtgcctctctgctgccgcagtcgctggcggcggcggccgcgttcccgacgcgcantaacagccaggagtccaaaactacttacctggaagaccttccaccaccccctgagtatgaattggccccgtccaagttagaagaggaagtggatgatgtctttctcattcgagctcaaggactgccctgggtcatggcactatgggaagatgtggctttaactttttttttccagacttgcagaatccggcaacggttgagtaatgggaattacattttnctccctaaaaacaagagatgggggaaaacgtaagggggtnnntggccttnaatt

SEQ ID NO: 380 - DNA, 455 bp, Homo sapiens
  misc_feature (315): n equals a,t,g, or c
  misc_feature (365): n equals a,t,g, or c
  misc_feature (421): n equals a,t,g, or c
  misc_feature (442): n equals a,t,g, or c
  misc_feature (447): n equals a,t,g, or c
  misc_feature (448): n equals a,t,g, or c
atgccatggtgcggctggtcaagtgcgacgtctacccctgccccaacacagtggactgcttcgtgtcccgccccaccgagaaaaccgtcttcaccgtcttcatgctagctgcctctggcatctgcatcatcctcaatgtggccgaggtggtgtacctcatcatccgggcctgtgcccgccgagcccagcgccgctccaatccaccttcccgcaagggctcgggcttcggccaccgcctctcacctgaatacaagcagaatgagatcaacaagctgctgagtgagcaggatggctccctgaaagacatactgcgcncaaccctggcacgggggctgggctggctgaaaaaaacgaccgtgctcggntgtgatgccacataccaggcaacctcccatcccaccccgaccttgcctgggcgaanccctccttctccctgccggtncccannggctcac

SEQ ID NO: 381 - DNA, 421 bp, Homo sapiens
  misc_feature (1): n equals a,t,g, or c
  misc_feature (3): n equals a,t,g, or c
  misc_feature (4): n equals a,t,g, or c
  misc_feature (8): n equals a,t,g, or c
  misc_feature (23): n equals a,t,g, or c
  misc_feature (156): n equals a,t,g, or c
  misc_feature (191): n equals a,t,g, or c
  misc_feature (387): n equals a,t,g, or c
  misc_feature (398): n equals a,t,g, or c
  misc_feature (410): n equals a,t,g, or c
  misc_feature (413): n equals a,t,g, or c
  misc_feature (421): n equals a,t,g, or c
ntnngcgnctgcaggtcgaacantagtggatccaaagaattcggcacgagtgggaacgaggggtgaagcggcccaggtgaggctcgccatggccaaacagctgcaggcccgaagctagacgggatcgactacaacccctgggtggagtttgtgaantggccagtgagcatgacgtcgtgaacttgggccanggcttcccggatttcccaccaccagactttgccgtggaagcctttcagcacgctgtcagtggagacttcatgcttaaccagtacaccaagacatttggttacccaccactggacgaggatcctggcaatttctttgggggagctgctgggtcaaggataagacccgttcagggatgtgctggtgactgttggtggntatgggggccngtttcaaaagcnttnccaggccn

SEQ ID NO: 382 - DNA, 545 bp, Homo sapiens
  misc_feature (5): n equals a,t,g, or c
  misc_feature (14): n equals a,t,g, or c
  misc_feature (57): n equals a,t,g, or c
  misc_feature (466): n equals a,t,g, or c
  misc_feature (505): n equals a,t,g, or c
aaggnagacacaancctcactaaagggaacaaaagctggagctccaccgcggtgcgnccgctctagaactagtggatcccccgggctgcaggaattcggcacgagcggcggcggcggcggcggcccagtcggtgtatgccttctcggcgcgcccgctggccggcggggagcctgtgagcctgggctccctgcggggcaaggtactacttatcgagaatgtggcgtccctctgaggcaccacggtccgggactacacccagatgaacgagctgcagcggcgcctcggaccccggggcctggtggtgctcggcttcccgtgcaaccagtttgggcatcaggagaacgccaagaacgaagagattctgaattccctcaagtacgtccggcctggtggtgggttcgagcccaacttcatgctcttcgagaagtgcgaggtgaacggtgcgggggcgcaccctctcttcgncttcctgcgggaggccctgccagctcccagcgacgacgncaccgcgcttatgaccgaccccaagctcatcacctggtct

SEQ ID NO: 383 - DNA, 375 bp, Homo sapiens
  misc_feature (224): n equals a,t,g, or c
  misc_feature (242): n equals a,t,g, or c
  misc_feature (264): n equals a,t,g, or c
  misc_feature (282): n equals a,t,g, or c
  misc_feature (329): n equals a,t,g, or c
  misc_feature (333): n equals a,t,g, or c
  misc_feature (348): n equals a,t,g, or c
  misc_feature (368): n equals a,t,g, or c
gctttcattgccaagtccttctatgacctcagtgccatcagcctggatggggagaaagtagatttcaatacgtctcggggcagggccgtgctgattgagaatgtggcttcgctctgaggcacaaccacccgggacttcacccagctcaacgagctgcaatgccgctttcccaggcgcctggtggtccttgggcttcccttgcaaccaatttgggacatcagganaactgtcaaaatgagganatcctgaacagtctcaattatnttccgtcctggggtgggnataccaaccccccttccccctttttccaaaaattttaaggttaaatnggcnaaaaaaaacatcctntttttccccctaccttaaangaaaaac

SEQ ID NO: 384 - DNA, 530 bp, Homo sapiens
  misc_feature (178): n equals a,t,g, or c
  misc_feature (354): n equals a,t,g, or c
  misc_feature (361): n equals a,t,g, or c
  misc_feature (382): n equals a,t,g, or c
  misc_feature (386): n equals a,t,g, or c
  misc_feature (415): n equals a,t,g, or c
  misc_feature (426): n equals a,t,g, or c
  misc_feature (436): n equals a,t,g, or c
  misc_feature (449): n equals a,t,g, or c
  misc_feature (515): n equals a,t,g, or c
  misc_feature (527): n equals a,t,g, or c
  misc_feature (529): n equals a,t,g, or c
gctcgtgccgtgagacacaaccacccgggacttcacccagctcaacgagctgcaatgccgctttcccaggcgcctggtggtccttggcttcccttgcaaccaatttggacatcagagcaggagagacagaagtagcaaaccctctttcgagatgtccctccagccccagaagtacctncagcctcacaccatctcttcagcctagcaagttgctggagggagtctataacctaccaggagccagccagccatttgtatcaagaaatagaaatctgcagggtacagtggctcacacctataatcccagcgctttgggaggctaagttctaggacaaaggcaaggaagaaaagcangaacttnaaaatccaattccttttgggncttnaaatttaaccttcaagttcaagggagctnaagtaaggcanaaggccaaanggctttttacttnaacaacaacggtgccaatttggaaaggcaaggccaaggcaaaaaacccaggggcaagaaggaaaangggaaaaggggntnt

SEQ ID NO: 385 - DNA, 465 bp, Homo sapiens
  misc_feature (151): n equals a,t,g, or c
  misc_feature (287): n equals a,t,g, or c
  misc_feature (310): n equals a,t,g, or c
  misc_feature (312): n equals a,t,g, or c
  misc_feature (329): n equals a,t,g, or c
  misc_feature (338): n equals a,t,g, or c
  misc_feature (347): n equals a,t,g, or c
  misc_feature (351): n equals a,t,g, or c
  misc_feature (354): n equals a,t,g, or c
  misc_feature (373): n equals a,t,g, or c
  misc_feature (383): n equals a,t,g, or c
  misc_feature (438): n equals a,t,g, or c
  misc_feature (449): n equals a,t,g, or c
  misc_feature (450): n equals a,t,g, or c
cacactcaagttctttcctgccagtgccgacaggacggtcatcgattacaacggggaacgcacgctggatggttttaagaaattcctggagagcggtggccaggatggggcaggggatgatgacgatctcgaggacctggaagaagcagangagccagacatggaggaagacgatgatcagaaagctgtgaaagatgaactgtaatacgcaaagccagacccgggcgctgccgagacccctcggggggctgcacaaccagcagcagcgcaaggcttccgagccttgngggctcggtttgaaaagaagggntngccgggaaacccagggnaactctctngaagttganactncanccctagaaaacgtccgttnaaccccgttnctttcttctgcttttcgggtttttggaaaagggattcatttccaggcaggccaancttgttggggnntgttcctgaaaccat

SEQ ID NO: 386 - DNA, 733 bp, Homo sapiens
  misc_feature (606): n equals a,t,g, or c
  misc_feature (621): n equals a,t,g, or c
  misc_feature (689): n equals a,t,g, or c
  misc_feature (703): n equals a,t,g, or c
gcggtgatcatgggggccccgggctcgggcaagggcaccgtgtcgtcgcgcatcactacacacttcgagctgaagcacctctccagcggggacctgctccgggacaacatgctgcggggcacagaaattggcgtgttagccaaggctttcattgaccaagggaaactcatcccagatgatgtcatgactcggctggcccttcatgagctgaaaaatctcacccagtatagctggctgttggatggttttccaaggacacttccacaggcagaagccctagatagagcttatcagatcgacacagtgattaacctgaatgtgccctttgaggtcattaaacaacgccttactgctcgctggattcatcccgccagtggccgagtctataacattgaattcaaccctcccaaaactgtgggcattgatgacctgactggggagcctctcattcagcgtgaggatgataaaccagagacggttatcaagagactaaaggcttatgaagaccaaacaaagccagtcctggaatattaccagaaaaaaggggtgctggaaacattctccggaacagaaaccaacaagatttggccctatgtatatgctttnctacaactaaagttncacaaagaagccagaaagctttaattacttcatgaggagaaatgtgtgtaactattaatagtaagaanggcaaaccttctantccttggatttaaaactggttttctaaaac

SEQ ID NO: 387 - DNA, 180 bp, Homo sapiens
  misc_feature (1): n equals a,t,g, or c
  misc_feature (6): n equals a,t,g, or c
  misc_feature (11): n equals a,t,g, or c
  misc_feature (43): n equals a,t,g, or c
  misc_feature (61): n equals a,t,g, or c
  misc_feature (123): n equals a,t,g, or c
  misc_feature (133): n equals a,t,g, or c
  misc_feature (151): n equals a,t,g, or c
  misc_feature (153): n equals a,t,g, or c
  misc_feature (159): n equals a,t,g, or c
nctttnatctntgaagtggatctacaatggcttcagcagtgtnctccagttcctaggactntacaagaaatctggaaaacttgtattcttcaggcttggttaatgtcaggcaaaaccactgtngttgcacatngcttcaaaggtgcgcagntngtgggncaacattgtttcccaacactt

SEQ ID NO: 388 - DNA, 428 bp, Homo sapiens
  misc_feature (49): n equals a,t,g, or c
  misc_feature (84): n equals a,t,g, or c
  misc_feature (90): n equals a,t,g, or c
  misc_feature (197): n equals a,t,g, or c
  misc_feature (263): n equals a,t,g, or c
  misc_feature (285): n equals a,t,g, or c
  misc_feature (286): n equals a,t,g, or c
  misc_feature (306): n equals a,t,g, or c
  misc_feature (366): n equals a,t,g, or c
  misc_feature (395): n equals a,t,g, or c
  misc_feature (414): n equals a,t,g, or c
  misc_feature (418): n equals a,t,g, or c
  misc_feature (427): n equals a,t,g, or c
gggaacagtaagaccgaggaccagcgcaacgaggagaaggcgcacgtgnaggccaacaaaaagatcgagaagcagctgcagaangacaancaggtctaccgggccacgcaccgcctgctgctgctgggtgctggagaatctggtaaaagcaccattgtgaagcagatgaggatcctgcatgttaatgggtttaatgnagacagtgagaaggcaaccaaagtgcaggacatcaaaaacaacctgaaagaggcgattgaaaccantgtggccgccatgagcaacctnngtgccccccgtggagctggncaaccccgagaaaccagttcagagtggactacatcctggagtgttatgaacgtgcctggnttttgacttccctccggattctatgagcnggcaaggtctgtggaggtnaagnttctgctgna

SEQ ID NO: 389 - DNA, 454 bp, Homo sapiens
  misc_feature (181): n equals a,t,g, or c
  misc_feature (184): n equals a,t,g, or c
  misc_feature (209): n equals a,t,g, or c
  misc_feature (240): n equals a,t,g, or c
  misc_feature (283): n equals a,t,g, or c
  misc_feature (287): n equals a,t,g, or c
  misc_feature (292): n equals a,t,g, or c
  misc_feature (309): n equals a,t,g, or c
  misc_feature (316): n equals a,t,g, or c
  misc_feature (319): n equals a,t,g, or c
  misc_feature (369): n equals a,t,g, or c
  misc_feature (402): n equals a,t,g, or c
  misc_feature (424): n equals a,t,g, or c
  misc_feature (426): n equals a,t,g, or c
  misc_feature (437): n equals a,t,g, or c
acccacgcgtccgcccacgcgtcccgagctcaaagacctccaggagccccaggagcccagggttgggaaactcaggaactttgcacccatccctggtgaacctgtggttcccatcctctgtagcaacccgaactttccagaagaactcaagcctctctgcaagagcccaatgcccaggagntanttcagaggctggaggaaatcgctgnaggacccggggcacatgtggaaatctgtgcntacgctggcctgtaccggatgctaagggggcttgccactggcnggcntcccntccgcagcaggggaagncttttcntcntgcagaaagggccacccatgatattccattccccagcagttcaactaacntggttccattcgggaaggagcagccggggaagnattgggttgattggaaggcttngncccaaatggtnctttccctggcaatttt

SEQ ID NO: 390 - DNA, 553 bp, Homo sapiens
  misc_feature (7): n equals a,t,g, or c
  misc_feature (29): n equals a,t,g, or c
  misc_feature (30): n equals a,t,g, or c
  misc_feature (58): n equals a,t,g, or c
  misc_feature (77): n equals a,t,g, or c
  misc_feature (414): n equals a,t,g, or c
  misc_feature (417): n equals a,t,g, or c
gcaaganaaaattaccctcactaaagggnncaaaagctggagctccaccgcggtgcgnccgctctagaactagtggntcccccgggctgcaggaattcggcacgagcagggacgctaagattgctacctggactttcgttgaccatgctgtcccgggtggtactttccgccgccgccacagcgccccctctctgaagaatgcagccttcctaggtccagggaccctatgtactcggaactgggcttatcttgtacgctttatccaaagaaatatatgtgattagcgcagagaccttcactgccctatcagtactaggtgtaatggtctatggaattaaaaaatatggtccctttgttgcagactttgctgataaactcaatgagcaaaaacttgcccaactagaagaggcgaanagngcttccatccaacacatccagaatgcaattgatacggagaagtcacaacaggcactggttcagaagcgccattacctttttggatgtgcaaaggaataacattgctatggctttggaagttacttacccgggaacg

SEQ ID NO: 391 - DNA, 632 bp, Homo sapiens
  misc_feature (12): n equals a,t,g, or c
  misc_feature (586): n equals a,t,g, or c
  misc_feature (613): n equals a,t,g, or c
cagtttcgaaantaaccctcactaaagggaacaaaagctggagctccaccgcggtgcggccgctctagaactagtggatcccccgggctgcaggaattcggcacgaggtcctgtgcggtcacttagccaagatgcctgaggaaacccagacccaagaccaaccgatggaggaggaggaggttgagacgttcgcctttcaggcagaaattgcccagttgatgtcattgatcatcaatactttctactcgaacaaagagatctttctgagagagctcatttcaaattcatcagatgcattggacaaaatccggtatgaaagcttgacagatcccagtaaattagactctgggaaagagctgcatattaaccttataccgaacaaacaagatcgaactctcactattgtggatactggaattggaatgaccaaggctgacttgatcaataaccttggtactatcgccaagtctgggaccaaagcgttcatggaagctttgcaggctggtgcagatatctctatgattggccagttcggtgttggtttttattctgcttatttggttgctgagaaagtaactgtgatcancaaacataacgatgatgagcagtacgnttgggagtcctcagcaggg

SEQ ID NO: 392 - DNA, 600 bp, Homo sapiens
  misc_feature (6): n equals a,t,g, or c
  misc_feature (162): n equals a,t,g, or c
  misc_feature (518): n equals a,t,g, or c
  misc_feature (571): n equals a,t,g, or c
  misc_feature (572): n equals a,t,g, or c
  misc_feature (587): n equals a,t,g, or c
  misc_feature (590): n equals a,t,g, or c
gctcanatctgccttctggagactgcgccgtcctcccgggagagccagaaagaggacatggctgctgggcagcgggaagcgaggccccaggtgtcactgacattcgaggacgtggctgtgctctttacctgggatgagtggagaaagctggctccttctcanagaaacttgtaccgggatgtgatgctggagaactataggaacctggtctcactgggactctcatttaccaaaccaaaagtcatctccctgttgcagcaaggagaagatccctgggaggtggagaaagacagttctggtgtctcctctctaggatgtaagagcacacctaaaatgacaaagtcaactcaaactcaggattcatttcaggagcagataaggaaaagattgaaaagggatgaaccctggaacttcatatcagaaagatcctgcatatatgaagagaaattaaagaaacagcaggacaaaaatgaaaatttacaaataatttcagttgcccatacaaaaatccttactgnagatagaagccataaaaatgttgaatttgcccaaaacttctacctgaaatcanncttcattaagcaccnganaattgcctaa

SEQ ID NO: 393 - DNA, 531 bp, Homo sapiens
  misc_feature (63): n equals a,t,g, or c
  misc_feature (267): n equals a,t,g, or c
  misc_feature (352): n equals a,t,g, or c
  misc_feature (376): n equals a,t,g, or c
  misc_feature (394): n equals a,t,g, or c
  misc_feature (395): n equals a,t,g, or c
  misc_feature (400): n equals a,t,g, or c
  misc_feature (451): n equals a,t,g, or c
  misc_feature (464): n equals a,t,g, or c
  misc_feature (471): n equals a,t,g, or c
  misc_feature (476): n equals a,t,g, or c
  misc_feature (512): n equals a,t,g, or c
tgcagctcttttcattttgccatccttttccagctccatgatggttctgcaggtttctgcggnccccccggacagtggctctgacggcgttactgatggtgctgctcacatctgtggttccagggcagggccactccagagaattaccttttccagggacggcaggaatgctacgcgtttaatggtaacagccagaaggacatcctggaggagaaagcgggcagtgccggaacaggatgtgcagacacaacttacggagctgggcgngcccatggaccctgcagcgccgagttccagcctagggtggaatgttttccccctccaagtagggggcccttggcagcaacacaanctgcttgtttggccaagtgacggntttttacccaggcagcannggtantcctgtcaactggattggaggcacatttgattttgcccggttagacatganggggttgggttcngttggtnaaatntgggttgggaattttaatgaaaaaggggggcaaagnaattttaaaggggggtttt

SEQ ID NO: 394 - DNA, 404 bp, Homo sapiens
  misc_feature (269): n equals a,t,g, or c
  misc_feature (295): n equals a,t,g, or c
  misc_feature (330): n equals a,t,g, or c
  misc_feature (382): n equals a,t,g, or c
  misc_feature (387): n equals a,t,g, or c
  misc_feature (390): n equals a,t,g, or c
  misc_feature (399): n equals a,t,g, or c
gggactctaattctgtaatatatcaaggaatctcgtaaaaccgacactaaaacgtccctgcctacaaatcatccggccaaattatgagttcattgtattatgcgaatgctttattttctaaatatccagcctcaagttcggttttcgctaccggagccttcccagaacaaacttcttgtgcgtttgcttccaacccccagcgcccgggctatggagcgggttcgggcgcttccttcgccgcctcgatgcagggcttgtaccccggcggngggggcatggcgggccagagcgcggncggcgtctacgcggccggctatgggctcgagccgngttccttcaacatgcactgcgcgccctttgagcagaaacctctccggggtgngcccnggngaattccgncaagg

SEQ ID NO: 395 - DNA, 499 bp, Homo sapiens
  misc_feature (10): n equals a,t,g, or c
  misc_feature (89): n equals a,t,g, or c
  misc_feature (90): n equals a,t,g, or c
  misc_feature (93): n equals a,t,g, or c
  misc_feature (95): n equals a,t,g, or c
  misc_feature (98): n equals a,t,g, or c
  misc_feature (112): n equals a,t,g, or c
  misc_feature (115): n equals a,t,g, or c
  misc_feature (119): n equals a,t,g, or c
  misc_feature (120): n equals a,t,g, or c
  misc_feature (125): n equals a,t,g, or c
  misc_feature (149): n equals a,t,g, or c
  misc_feature (172): n equals a,t,g, or c
  misc_feature (211): n equals a,t,g, or c
  misc_feature (223): n equals a,t,g, or c
  misc_feature (225): n equals a,t,g, or c
  misc_feature (299): n equals a,t,g, or c
  misc_feature (426): n equals a,t,g, or c
  misc_feature (442): n equals a,t,g, or c
  misc_feature (443): n equals a,t,g, or c
  misc_feature (445): n equals a,t,g, or c
  misc_feature (457): n equals a,t,g, or c
  misc_feature (470): n equals a,t,g, or c
  misc_feature (477): n equals a,t,g, or c
  misc_feature (484): n equals a,t,g, or c
ggcacgaggngcggcgggtctggagcccccatcctcctgcggcagatgttcgagcctgtaagctgcaccttcacgtacctgctgggtgnnagngngtnccgggaggccgttntgntcgnnccagncctggaaacagcgcctcgggatgnccagctgatcaaggagctggggnttcggctgctctatgctggcgttggagaccagggccagncctggccacaantnaggctgtgtcaccttcgttctgaatgaccacagcatggccttcactggagatgccctgttgatccgtgggtgtnggcggacagactttcagcaaggctgttgccaagaccttgtaaccattcggtccatgaaaagatctttcaaaatttccaggagactgtcttgatctaacctggttcaaggttaccatggggtttaaantgttcaacgtggaggnngnggaggacttttnaaacccttggttnaaccttnaattttnaggagtttttcaaaa

SEQ ID NO: 396 - DNA, 526 bp, Homo sapiens
  misc_feature (445): n equals a,t,g, or c
  misc_feature (502): n equals a,t,g, or c
  misc_feature (508): n equals a,t,g, or c
  misc_feature (519): n equals a,t,g, or c
  misc_feature (523): n equals a,t,g, or c
ggtccccgtcacgctgactttccgtgcagtgctgtggtgcgaaaatgcctcgccgctcctggtagacgaagaggaagacaaacctacagtcgcttccaaactctagagttggaaaaggaatttctttttaacccctatctgaccaggaaaagaagaatcgaggtttcccacgccctagccctcaccgagagacaggtaaaaatctggttccagaacaggagaatgaaatggaaaaaggaaaacaacaaggacaaatttcccgtttcccggcaggaggtgaaggacggggaaacgaaaaaggaagcccaagagctggaggaagacagagccgaaggcctgacaaattaacttctacctttaaaatttaccacagactattaaaactaataatcaccatatgctgtggacaccacctattttctttggtggaaaggaccttacctgngtttcaagctaccttcatgtcactggtcttgagggtttctgggcttttgagagggantttggnggtttaaaaangttntag

SEQ ID NO: 397 - DNA, 443 bp, Homo sapiens
  misc_feature (94): n equals a,t,g, or c
  misc_feature (443): n equals a,t,g, or c
gcccacgcgtccgggtgctccttacctccccggtggtcgggcgcgaattactggaaattggcttttcccgttggggccgaagtaccttccctgnggcggcgactcagcggggtgtcgttcggccggcgtgacgcagccggatcggcgccagacggaaacctagcggtgactgtatctgaattttgcagctgcagaatgtgtagtaccttaaaaggttggcaacaatgagtaaaccagaattaaaggaagacaagatgctggaggttcactttgtgggagatgatgatgttcttaatcacattctagatagagaaggaggagctaaattgaagaaggagcgagcgcacttttggtcaaccccaaaaaaataataaagaagccagaatatgatttggaggaagatgaccaggaggtcttaaaagatcagaactatgtggaaattn

SEQ ID NO: 398 - DNA, 652 bp, Homo sapiens
  misc_feature (14): n equals a,t,g, or c
  misc_feature (16): n equals a,t,g, or c
  misc_feature (21): n equals a,t,g, or c
  misc_feature (31): n equals a,t,g, or c
  misc_feature (64): n equals a,t,g, or c
  misc_feature (68): n equals a,t,g, or c
  misc_feature (78): n equals a,t,g, or c
  misc_feature (88): n equals a,t,g, or c
  misc_feature (91): n equals a,t,g, or c
  misc_feature (100): n equals a,t,g, or c
  misc_feature (103): n equals a,t,g, or c
  misc_feature (111): n equals a,t,g, or c
  misc_feature (116): n equals a,t,g, or c
  misc_feature (134): n equals a,t,g, or c
  misc_feature (261): n equals a,t,g, or c
  misc_feature (325): n equals a,t,g, or c
  misc_feature (383): n equals a,t,g, or c
  misc_feature (387): n equals a,t,g, or c
  misc_feature (397): n equals a,t,g, or c
  misc_feature (549): n equals a,t,g, or c
  misc_feature (579): n equals a,t,g, or c
  misc_feature (594): n equals a,t,g, or c
  misc_feature (606): n equals a,t,g, or c
  misc_feature (620): n equals a,t,g, or c
  misc_feature (639): n equals a,t,g, or c
gcccacgcgtccgnanacgcntccgtttggnccaagatggcatggaatgaggaaggcgcttccntggngactggtggncttggcgtcnctncgggctgtnagnacctcatntatgngcactttaccaaagcggntgaaaattgtggaagttggtccccgagatggactacaaaatgaaaagaatatcgtatctactccagtgaaaatcaagctgatagacatgctttctgaagcaggactctctgttatagaaaccaccanctttgagtctcctaagtgggttccccagatgggtgaccacactgaagtcttgaagggcattcanaagtttcctggcatcaactacccagtcctgaccccaaatttgaaaggcttcgaggcancggnaccatgactnctgtgaggatgcagcactccctggcaggtcagacctatgccgtgcccttcatccagccagacctgcggcgagaggaggccgtccagcagatggcggatgccctgcagtacctgcagaaggctctggagacatcttcagcaagtgggtgctgncactcacccccacctgatgagagggccatncctgtctgggcaatnccagcaacacancctttgggagcaanccccttggggaatcccggnctggggaacccat

SEQ ID NO: 399 - DNA, 341 bp, Homo sapiens
  misc_feature (39): n equals a,t,g, or c
  misc_feature (84): n equals a,t,g, or c
  misc_feature (137): n equals a,t,g, or c
  misc_feature (153): n equals a,t,g, or c
  misc_feature (302): n equals a,t,g, or c
  misc_feature (310): n equals a,t,g, or c
  misc_feature (332): n equals a,t,g, or c
ggcacgagaggacctggataaagcacttctaaaggcctntcaggacatgttcgacaagaaaaccaaggcttccctttacctctncactcacaatgggaacatgtacacctcatccctgtacgggtgcctggcctcgnttctgtcccaccactntgcccaagaactggctggctccaggattggtgccttctcttatggctctggtttagcagcaagtttcttttcatttcgagtatcccgtctaaaggtgttctgcagatccatggaaagcttctgggaaacgtatgctagcagagcttctncccgtgantcatatttttaagatcccactnttagctgga

SEQ ID NO: 400 - DNA, 604 bp, Homo sapiens
  misc_feature (392): n equals a,t,g, or c
  misc_feature (484): n equals a,t,g, or c
  misc_feature (502): n equals a,t,g, or c
  misc_feature (509): n equals a,t,g, or c
  misc_feature (559): n equals a,t,g, or c
  misc_feature (593): n equals a,t,g, or c
gcctccgcataggcctgcgtcagattaaaacactgaactgacaattaacagcccaatatctacaatcaaccaacaagtcattattaccctcactgtcaacccaacacaggcatgctcataaggaaaggttaaaaaaagtaaaaggaactcggcaaatcttaccccgcctgtttaccaaaaacatcacctctagcatcaccagtattagaggcaccgcctgcccagtgacacatgtttaacggccgcggtaccctaaccgtgcaaaggtagcataatcacttgttccttaaatagggacctgtatgaatggcttcacgagggttcagctgtctcttacttttaaccagtgaaattgacctgcccgtgaagaggcggcatgacacagcaagacnaagaagaccctatggagctttaatttattaatgcaaacagtacctacaaacccacaggtcctaactaccaaacctgcattaaaaaattcggntggggcgacctcggacanaaccaanctccagcagtacatgctaaacttaccagcaaacgactatatctaattgancatacttgacaaggacaagtacctaggaacaggnaatctttttaa

SEQ ID NO: 401 - DNA, 519 bp, Homo sapiens
cataatcacttgttccttaattagggacctgtatgaatggctccacgagggttcagctgtctcttacttttaaccagtgaaattgacctgcccgtgaagaggcgggcataacacagcaagacgagaagaccctatggagctttaatttattaatgcaaacagtacctaacaaacccacaggtcctaaactaccaaacctggcattaaaaatttcggttggggcgacctcggagcagaacccaacctccgagcagtacatgctaagacttcaccagtcaaagcgaactactatactcaattgatccaataacttgaccaacggaacaagttaccctagggataacagcgcaatcctattctagagtccatatcaacaatagggtttacgacctcgatgttggatcaggacatcccgatggtgcagccgctattaaaggttcgtttgttcaacgattaaagtcctacgtgatctgagttcagaccggagtaatccaggtcggtttctatctactttcaaat

SEQ ID NO: 402 - DNA, 265 bp, Homo sapiens
  misc_feature (23): n equals a,t,g, or c
  misc_feature (213): n equals a,t,g, or c
  misc_feature (218): n equals a,t,g, or c
  misc_feature (233): n equals a,t,g, or c
  misc_feature (255): n equals a,t,g, or c
  misc_feature (264): n equals a,t,g, or c
gctgccagtagcatatgcttgtntcaaagattaagccatgcatgtctaagtacgcacggccggtacagtgaaactgcgaatggctcattaaatcagttatggttcctttggtcgctcgctcctctcctacttggataactgtggtaattctagagctaatacatgccgacgggcgctgacccccttcgcgggggggatgcgtgcatttatcanatcanaaccaacccggtcancccctctccggccccggccggngggcggcgnc

SEQ ID NO: 403 - DNA, 325 bp, Homo sapiens
  misc_feature (137): n equals a,t,g, or c
  misc_feature (138): n equals a,t,g, or c
  misc_feature (172): n equals a,t,g, or c
  misc_feature (173): n equals a,t,g, or c
  misc_feature (200): n equals a,t,g, or c
  misc_feature (263): n equals a,t,g, or c
gcaggtacttggttctccagtgggagctgccctctcgaaggcaggacagcggtggcggcagatataaagacctgaagatagtcttttctgtccaaagatggaaaacagtactactaccatttctcgggaggagcttnnagaactacaagaggcatttaataaaatagatatnnacaatagtgggtatgtcagtgactatnaacttcaagacctgtttaaggaagcaagccttcctctgcctggctacaaggtgcgcgagattntggagaaaattctatcagttgctgacagcaacaaagatggcaaaatcaattttgaagagttt

SEQ ID NO: 404 - DNA, 540 bp, Homo sapiens
  misc_feature (469): n equals a,t,g, or c
  misc_feature (473): n equals a,t,g, or c
  misc_feature (489): n equals a,t,g, or c
  misc_feature (526): n equals a,t,g, or c
  misc_feature (537): n equals a,t,g, or c
ataactatatctttcttcctctgtctccgcccacccacatttttctctttccctttctctctttggggaccctcccccatgctcccctgccccatccccttttccccttcccgtcttctcatccctccattcccatctttccccagcaattaccagctctggctgggtcgccacaacttgtttgacgacgaaaacacagcccagtttgttcatgtcagtgagagcttcccacaccctggcttcaacatgagcctcctggagaaccacacccgccaagcagacgaggactacagccacgacctcatgctgctccgcctgacagagcctgctgataccatcacagacgctgtgaaggtcgggaagttgcccacccaggaacccgaagtgggggagcacctggttggcttccggctggggcaagcattgaaccagaagaatttcttaatttcagaagatcttcaaatggtgngganccttcaaaaatcctgnctaaaggaataaatggcgaaaaaagcccaacgttcanaaaggtggacngga

SEQ ID NO: 405 - DNA, 319 bp, Homo sapiens
  misc_feature (5): n equals a,t,g, or c
  misc_feature (94): n equals a,t,g, or c
  misc_feature (296): n equals a,t,g, or c
  misc_feature (298): n equals a,t,g, or c
  misc_feature (301): n equals a,t,g, or c
  misc_feature (309): n equals a,t,g, or c
  misc_feature (313): n equals a,t,g, or c
ctgcnccgccgcgggccccagctgcgcgctgaaggccggcaagacagcgagcggtgcgggcgaggtggtgcgctgtctgtctgagcagagcgtnggccatctcgcgctgcgccgggggcccggggcgcgcctgcctgccctgctggacgagcagcaggtaaacgtgctgctctacgacatgaacggctgttactcacgcctcaaggagctggtgcccaccctgccccagaaccgcaagtgaagcaaggtggagattttccagcacgtcatcgactacatcagggactttaatttgnanttnaatcggantccnaatttg

SEQ ID NO: 406 - DNA, 355 bp, Homo sapiens
  misc_feature (5): n equals a,t,g, or c
  misc_feature (10): n equals a,t,g, or c
  misc_feature (23): n equals a,t,g, or c
  misc_feature (27): n equals a,t,g, or c
  misc_feature (41): n equals a,t,g, or c
  misc_feature (46): n equals a,t,g, or c
  misc_feature (57): n equals a,t,g, or c
  misc_feature (86): n equals a,t,g, or c
  misc_feature (121): n equals a,t,g, or c
  misc_feature (124): n equals a,t,g, or c
  misc_feature (141): n equals a,t,g, or c
  misc_feature (145): n equals a,t,g, or c
  misc_feature (150): n equals a,t,g, or c
  misc_feature (171): n equals a,t,g, or c
  misc_feature (216): n equals a,t,g, or c
  misc_feature (251): n equals a,t,g, or c
  misc_feature (253): n equals a,t,g, or c
  misc_feature (266): n equals a,t,g, or c
  misc_feature (283): n equals a,t,g, or c
  misc_feature (304): n equals a,t,g, or c
  misc_feature (321): n equals a,t,g, or c
  misc_feature (325): n equals a,t,g, or c
ggcanaggtncagctgaccctgncggncacacagtgcccanagggnaagtccgtaanatgccacgtgaaagcactacacgattccnagccaggatgtaactgtgcccctgcccagttcccncancttccccatgctgccancccngattntggctgaaacgaccggccctngaggacctggtcttaggttcagaagcgaagcatcacgtgacacantgaccggcctgagagaatgcctctggtgaccactntnacctgggacgccnttaaagtgggaagagcnctgtttcaaggaccacctggngcgtgacctgtgtgggnttgntacaggtgttccagtgtgctgactggttgt

SEQ ID NO: 407 - DNA, 437 bp, Homo sapiens
  misc_feature (5): n equals a,t,g, or c
  misc_feature (110): n equals a,t,g, or c
  misc_feature (272): n equals a,t,g, or c
  misc_feature (296): n equals a,t,g, or c
  misc_feature (370): n equals a,t,g, or c
  misc_feature (389): n equals a,t,g, or c
  misc_feature (412): n equals a,t,g, or c
  misc_feature (430): n equals a,t,g, or c
  misc_feature (435): n equals a,t,g, or c
ggcanagcacaagcccagcaacaccaaggtggacaagagagttgagtccaaatatggtcccccatgcccatcatgcccagcacctgaatttcctggggggaccatcagtnttcctgttccccccaaaacccaaggacactctcatgaatctcccggacccctgaaggtcacgtgcgtggtggtggacgtgaagccagggaagaccccgaggtccagttcaactggtacgtggatggcgtggaggtgcataatgccaagacaaagccgcgggnggagcagttcaacagcacgtaccngtggttcagcgtccttcaccgtcctgcaccaggatggcttgaacggcaagggagttacaagtggcaaggttttncaacaaagggcttcccgtncttccttggggaaaacctttttncaaaggccaaggggcagncccgngg

SEQ ID NO: 408 - DNA, 310 bp, Homo sapiens
  misc_feature (102): n equals a,t,g, or c
  misc_feature (137): n equals a,t,g, or c
  misc_feature (277): n equals a,t,g, or c
  misc_feature (289): n equals a,t,g, or c
  misc_feature (294): n equals a,t,g, or c
  misc_feature (298): n equals a,t,g, or c
  misc_feature (303): n equals a,t,g, or c
gggggatattgtagtggtggtagctgctctaatttctacttctaccacatggacgtctggggcgaaaggaccacggtcaccgtctcctcagcctccaccaanggcccatcggtcttccccctggcgccctgctccangaacacctccgaaaacacagcggccctgggctgcctggtcaaggactacttccccgaaaccggtgacggtgtcttggaactcagggggctctgaccagcggggtgcacaccttcccagctgtcctacagtcctcaggaanctactccctcancaccntggngacgntgcctcc

SEQ ID NO: 409 - DNA, 421 bp, Homo sapiens
  misc_feature (52): n equals a,t,g, or c
  misc_feature (74): n equals a,t,g, or c
  misc_feature (235): n equals a,t,g, or c
  misc_feature (246): n equals a,t,g, or c
  misc_feature (279): n equals a,t,g, or c
  misc_feature (346): n equals a,t,g, or c
  misc_feature (382): n equals a,t,g, or c
  misc_feature (384): n equals a,t,g, or c
  misc_feature (405): n equals a,t,g, or c
  misc_feature (417): n equals a,t,g, or c
gctcagttaggacccatacggaaccatggaagccccagcgcagcttctcttnctcctgctactctggctcccanataccactggagaaatactgatgacgcagtctccagccaccctgtctgtgtctccaggggaaagagtcaccctctcctgcagggccgggcagagtgtttacagcaacttagcctggtatcagcagaaacctggccaggctcccaggctcctcatgtatggntcatccaccanggccactgatgtcccagtcaggttcagtggcantgggtctgggacagagttcactctcaccatcagcagcctgcagtctgacgattctgcagtctatttntgtcagcagtatattatgtggcctggaaccttcggncnagggaccaagggggaaatcanacgaactggggntgca

SEQ ID NO: 410 - DNA, 448 bp, Homo sapiens
  misc_feature (8): n equals a,t,g, or c
  misc_feature (9): n equals a,t,g, or c
  misc_feature (11): n equals a,t,g, or c
  misc_feature (13): n equals a,t,g, or c
  misc_feature (14): n equals a,t,g, or c
  misc_feature (342): n equals a,t,g, or c
  misc_feature (361): n equals a,t,g, or c
  misc_feature (384): n equals a,t,g, or c
  misc_feature (421): n equals a,t,g, or c
  misc_feature (424): n equals a,t,g, or c
  misc_feature (443): n equals a,t,g, or c
gtacggcnngntnntttcgggtcgaccgcgccttccgcggacgcgtgggttcggacgcgtgggcggacgcgtggggccgaggctgccaagatgcttggagaagcactgagcaagaaccctggctacatcaaacttcgcaagattcgagcagcccagaatatctccaagacgatcgccacatcacagaatcgtatctatctcacagctgacaaccttgtgctgaacctacaggatgaaagtttcaccaggggaagtgacagcctcatcaagggtaagaaatgagcctagtcaccaagaactccacccccagaggaagtggatctgcttctccagttttggagnaccaccaggggtccagaanagccctaccccgccccattatcntgcaatggtccccacaccgggttccctgaaccctctnggnttaaggaaaatgaaaatanccctt

SEQ ID NO: 411 - DNA, 141 bp, Homo sapiens
  misc_feature (67): n equals a,t,g, or c
  misc_feature (95): n equals a,t,g, or c
  misc_feature (101): n equals a,t,g, or c
  misc_feature (120): n equals a,t,g, or c
  misc_feature (138): n equals a,t,g, or c
gattgatctcatgtgcaagaaaatgaagcacctgtggttcttcctcctgctggtggcagtctcccanatgcgtcctgtcccaggtgcagctgcangagtcngggccaggactggtgaagncttcggagaccctgtccntca

SEQ ID NO: 412 - DNA, 473 bp, Homo sapiens
  misc_feature (253): n equals a,t,g, or c
  misc_feature (403): n equals a,t,g, or c
  misc_feature (461): n equals a,t,g, or c
  misc_feature (469): n equals a,t,g, or c
  misc_feature (471): n equals a,t,g, or c
  misc_feature (472): n equals a,t,g, or c
ggaaaggagccccagccctgagattcccaggtgtttccattcggtgatcagcactgaacacagaactcaccatggagtttggactgagctgggttttccttgttgttattttaaaaggtgtccagtgtgaagtgcagctggtggagtctgggggagccgtagtacagcctggggggtcccttagactctcctgtgaagcctctggattcacctttgacaattatgccatgcactgggtccgtcaagctccggngaagggtctggagtgggtctgtctcatcagtcgggatggtcgtaagacatattttgcagactctatgaagggtcggttcaccatctccagagacaacagcaaaaactgcctgtatctccaagtgaacagtctgagagttgaggacaccgncttgtattactgtgcaaaagatatcccggggtcgtcggtatggacgtctggggtaaanggacaccngnna

SEQ ID NO: 413 - DNA, 328 bp, Homo sapiens
  misc_feature (183): n equals a,t,g, or c
  misc_feature (187): n equals a,t,g, or c
  misc_feature (188): n equals a,t,g, or c
  misc_feature (228): n equals a,t,g, or c
  misc_feature (241): n equals a,t,g, or c
  misc_feature (242): n equals a,t,g, or c
  misc_feature (288): n equals a,t,g, or c
ggtcctggactccaaggcctttccacttggtgatcagcactgagcacagaggactcaccatggaattggggctgagctgggttttccttgttgctattttagaaggtgtccagtgtgaggtgcagctggtggagtctgggggaggcttggtccaagccgggggggtccctgagactctcctgngcannctctggcttccccctttataaccatgggatgacctgggtncgccaggctccanngaaggggctggaatgggtggccaccatacagtgagatgaaactganaaatactatgtggactctgtgaagggccgattcaccatct

SEQ ID NO: 414 - DNA, 575 bp, Homo sapiens
  misc_feature (14): n equals a,t,g, or c
  misc_feature (361): n equals a,t,g, or c
  misc_feature (470): n equals a,t,g, or c
  misc_feature (511): n equals a,t,g, or c
  misc_feature (527): n equals a,t,g, or c
  misc_feature (539): n equals a,t,g, or c
  misc_feature (544): n equals a,t,g, or c
  misc_feature (573): n equals a,t,g, or c
ggccgtgagattcncaggagtttccacttggtgatcagcactgaacacagaccaccaaccatggagtttgggcctagctgggttttccttgttgctattttaaaaggtgtccactgtgaggtgcagctggtggagtctgggggaggcttggtacagccagggcggtccctgagactctcctgtacaacttctggattcacctttggagattattctatgagctgggtccgccaggctccagggaaggggctggagtgggtaggtttcattagaagcaaagcgcatggtgggacaacagaatacgccgcgtctgtgaaaaggcagattcaccatctcaaagagatgattccacaggcatcgnctatctggcaaatgaacagcctgaaaccgaggacacagacattattactgtctagacatgactacaggcacacccctggctactgggggcagggaaccctggtcaccgncttctctggcttccaccaagggccatcgtcttccccctggngcccttgttccaggancacttccgaaanccagnggcctgggcttgctgggcaagggctcttncc

SEQ ID NO: 415 - DNA, 438 bp, Homo sapiens
  misc_feature (37): n equals a,t,g, or c
  misc_feature (65): n equals a,t,g, or c
  misc_feature (105): n equals a,t,g, or c
  misc_feature (139): n equals a,t,g, or c
  misc_feature (157): n equals a,t,g, or c
  misc_feature (190): n equals a,t,g, or c
  misc_feature (201): n equals a,t,g, or c
  misc_feature (269): n equals a,t,g, or c
  misc_feature (281): n equals a,t,g, or c
  misc_feature (296): n equals a,t,g, or c
  misc_feature (297): n equals a,t,g, or c
  misc_feature (301): n equals a,t,g, or c
  misc_feature (303): n equals a,t,g, or c
  misc_feature (312): n equals a,t,g, or c
  misc_feature (323): n equals a,t,g, or c
  misc_feature (330): n equals a,t,g, or c
  misc_feature (331): n equals a,t,g, or c
  misc_feature (333): n equals a,t,g, or c
  misc_feature (350): n equals a,t,g, or c
  misc_feature (351): n equals a,t,g, or c
  misc_feature (356): n equals a,t,g, or c
  misc_feature (371): n equals a,t,g, or c
  misc_feature (385): n equals a,t,g, or c
  misc_feature (397): n equals a,t,g, or c
  misc_feature (422): n equals a,t,g, or c
gtccagtgtgaggtgcagctggtggagtctgggggangcttggtacagcctggggggtctctganactctcctgtgcagcctctggattcaccttcagtagttangacatgcattgggtccgccaagttgcaggaaaangtctggaatgggtctcangtattgatcctgctggtaacacaaactatccangctccgtgaanggccgattcatcatctccagagaaaatgacaagagctcctcgtatcttcaaaatgaatgggctgacanccggggaaaacngtgtgtaatattgtnnaaananaaattgcanttcctggtaantgggtanntncgatctcttggggccgnnggaanccttggttaaatgtnttcctcaagaattncccgaaccaagnccccaaaggtttttcccgcttaaancctttgaaaaagaaac

SEQ ID NO: 416 - DNA, 502 bp, Homo sapiens
  misc_feature (22): n equals a,t,g, or c
  misc_feature (48): n equals a,t,g, or c
  misc_feature (105): n equals a,t,g, or c
  misc_feature (135): n equals a,t,g, or c
  misc_feature (145): n equals a,t,g, or c
  misc_feature (312): n equals a,t,g, or c
  misc_feature (367): n equals a,t,g, or c
  misc_feature (428): n equals a,t,g, or c
  misc_feature (451): n equals a,t,g, or c
  misc_feature (455): n equals a,t,g, or c
  misc_feature (474): n equals a,t,g, or c
  misc_feature (480): n equals a,t,g, or c
ggcacgagcaacgctggcaatnataacacaaaatattcacagaagttncaggacagagtcaccattaccagggacacatccacgaacacagcctacatggatctnagcagcctgagatctgaagacacggctgtntattattgtncgaggggattttttggggaccgtgattactactactactactacatggacgtctggggcaaagggaccacggtcaccgtctcctcagcatccccgaccagccccaaggtcttcccgctgagcctctgcagcacccagccagatgggaacgtggtcatcgcctgcttngtccagggcttcttcccccaggagccacttcagtgtggacctggagcgaaagggnacagggcgtgaccgccagaaaattcccacccagccaggatgcctccgggggacctgtacancacgagcagccagctgaccctgncggncacaagtgccttagccggnaagttncgttgacattgccacgtggaag

SEQ ID NO: 417 - DNA, 427 bp, Homo sapiens
  misc_feature (230): n equals a,t,g, or c
  misc_feature (233): n equals a,t,g, or c
  misc_feature (325): n equals a,t,g, or c
  misc_feature (352): n equals a,t,g, or c
  misc_feature (363): n equals a,t,g, or c
  misc_feature (388): n equals a,t,g, or c
  misc_feature (411): n equals a,t,g, or c
  misc_feature (427): n equals a,t,g, or c
gatcatgagtatctatgtgaattggtatcggcagaaagcaggaaaagcccctgagctcctgatccacggtggcatccagcttacaaagtggagtccccggaaggttcagtggcagggggatctgggacagatttcactctcaccattagcagtctgcaacctgaagattttggcacttacttctgtcaacagaattacaatgtcccgtggaacgttcggccaggggaacnaangtggaaaatgaaaccgaactgtggctgcaccatctgtcttcatcttcccgccatctgatgagcagttgaaatctggaactgcctctgttgtnttgcctgctgaataacttctatcccanaaaaggccaanttcattggaaggtggataacccccnccatcggttactcccggaaaatntcccaaaccggacgcn

SEQ ID NO: 418 - DNA, 308 bp, Homo sapiens
  misc_feature (126): n equals a,t,g, or c
  misc_feature (132): n equals a,t,g, or c
  misc_feature (182): n equals a,t,g, or c
  misc_feature (254): n equals a,t,g, or c
  misc_feature (262): n equals a,t,g, or c
  misc_feature (270): n equals a,t,g, or c
  misc_feature (282): n equals a,t,g, or c
  misc_feature (297): n equals a,t,g, or c
gctccaactctggcaacacagccactttgaccatcagcgggactcaggctatggatgaggctgactattactgtcaggcgtgggacagtagcgctgtggtcttcggcggagggaccaggctgaccntcctangtcagcccaaggctgccccctcggtcactctgttcccgccctcctctgangagcttcaagccaacaaggccacactggtgtgtctcataaatgacttctacccgggaagccgtgacagtggnctggaaangcagatancaaccccgttcnaggcggaattggganaaacaaccaca

SEQ ID NO: 419 - DNA, 482 bp, Homo sapiens
  misc_feature (370): n equals a,t,g, or c
  misc_feature (441): n equals a,t,g, or c
  misc_feature (449): n equals a,t,g, or c
  misc_feature (462): n equals a,t,g, or c
tcgacccacgcgtccgcagctgtgggcacaagaggcagcactcaggacaatctccagcatggcctggtctcctctcctcctcactctcctcgctcactgcacagggtcctgggcccagtctgtgctgacgcagccgccctcagtgtctggggccccagggcagagggtcaccatctcctgcactgggagcagctccaacatcggggcaggttatgatgtacactggtaccagcagcttccaggaacagcccccaaagtcctcatctatggtaacagcaatcggccctcaggggtccctgaccgattctctggctccaagtctggcacctcagcctccctggccatcactgggctccaggctgaagatgangttgattattactgccagtcctatgacagcagcctgggtggttcggtgttcggcggaaggaccaagctgancgtcctangtcagcccaaagntgccccctcggtaactctgt

SEQ ID NO: 420 - DNA, 462 bp, Homo sapiens
  misc_feature (21): n equals a,t,g, or c
  misc_feature (71): n equals a,t,g, or c
  misc_feature (85): n equals a,t,g, or c
  misc_feature (86): n equals a,t,g, or c
  misc_feature (100): n equals a,t,g, or c
  misc_feature (110): n equals a,t,g, or c
  misc_feature (438): n equals a,t,g, or c
  misc_feature (446): n equals a,t,g, or c
  misc_feature (452): n equals a,t,g, or c
  misc_feature (456): n equals a,t,g, or c
  misc_feature (459): n equals a,t,g, or c
gacaggattcaggacaatctncaccatggccggcttccctctcctcctcaccctcctcactcactgtgcanggtcctgggcccannctgtgctgactcanccaccctcancgtctgggacccccgggcagagggtcaccatctcttgttctggaagcagctccaacatcggaactaattatgtatactggtaccagcagctcccaggaacggcccccgaagtcctcatctataagaatgatcagcggccctcaggggtccctgaccgattctctggctccaagtctggcacctcagcctccctggccatcggtgggctccggtccgaggatgaggctgattattactgtgcatcatgggatgacagcctgagtggtccggtcttcggcggagggaccaagctgaccgtcttgggtcagcccaaggctgccccctcggncactctgntcccgncctnctntga

SEQ ID NO: 421 - DNA, 435 bp, Homo sapiens
  misc_feature (324): n equals a,t,g, or c
  misc_feature (351): n equals a,t,g, or c
  misc_feature (391): n equals a,t,g, or c
  misc_feature (416): n equals a,t,g, or c
  misc_feature (423): n equals a,t,g, or c
  misc_feature (431): n equals a,t,g, or c
ggaggcagagctctgggaatctcaccatggcctggacccctctcctgctccccctcctcactttctgcacagcggaagagaggccaggcccctgtggtggtcatctatgaggacaacaaacgaccctccgggatccctgagagattctctggctccacctcagggacattggccaccgtgattatcagtggggcccaggtggacgatgatactgacttctactgtcagtcaacacacagtagtaataatggtaggtccgtatgtcttcggaactgggaccaaggtcaccgtccttggtcagcccaaggccaaccccaatgtcantctgttcccggcctcctctgaaggagnttcaagccaaacaaaggcacactaagtgtgtctgatcagngagttttaaccgggaagtgtgaaantgggctnggaagcanattg

SEQ ID NO: 422 - DNA, 334 bp, Homo sapiens
  misc_feature (11): n equals a,t,g, or c
  misc_feature (101): n equals a,t,g, or c
  misc_feature (122): n equals a,t,g, or c
  misc_feature (135): n equals a,t,g, or c
  misc_feature (145): n equals a,t,g, or c
  misc_feature (310): n equals a,t,g, or c
  misc_feature (323): n equals a,t,g, or c
  misc_feature (324): n equals a,t,g, or c
  misc_feature (326): n equals a,t,g, or c
  misc_feature (331): n equals a,t,g, or c
gcagaactctnggtgtctcaccatggcctggatccctctacttctccccctcctcactctctgcacagactctgaggcctcccatgaattgagacaaccantttcggtgtcagtgtccccangacagacggccangatcacctgntctggagatgcattgccagaacaatctattttttggtatcaacagaagccaggccaggcccctgtattggtgatttataaagtccatgagaggccgtcagatgccctgaacgattctctggctccaggtcacagacaacagtcacgttgaccatcagtggagccnagggcaaaaaatnngnggggngtg

SEQ ID NO: 423 - DNA, 597 bp, Homo sapiens
  misc_feature (1): n equals a,t,g, or c
  misc_feature (8): n equals a,t,g, or c
  misc_feature (26): n equals a,t,g, or c
  misc_feature (61): n equals a,t,g, or c
  misc_feature (81): n equals a,t,g, or c
  misc_feature (115): n equals a,t,g, or c
  misc_feature (117): n equals a,t,g, or c
  misc_feature (118): n equals a,t,g, or c
  misc_feature (126): n equals a,t,g, or c
  misc_feature (132): n equals a,t,g, or c
  misc_feature (168): n equals a,t,g, or c
  misc_feature (174): n equals a,t,g, or c
  misc_feature (176): n equals a,t,g, or c
  misc_feature (189): n equals a,t,g, or c
  misc_feature (199): n equals a,t,g, or c
  misc_feature (201): n equals a,t,g, or c
  misc_feature (204): n equals a,t,g, or c
  misc_feature (209): n equals a,t,g, or c
  misc_feature (217): n equals a,t,g, or c
  misc_feature (230): n equals a,t,g, or c
  misc_feature (257): n equals a,t,g, or c
  misc_feature (259): n equals a,t,g, or c
  misc_feature (272): n equals a,t,g, or c
  misc_feature (277): n equals a,t,g, or c
  misc_feature (296): n equals a,t,g, or c
  misc_feature (333): n equals a,t,g, or c
  misc_feature (344): n equals a,t,g, or c
  misc_feature (393): n equals a,t,g, or c
  misc_feature (412): n equals a,t,g, or c
  misc_feature (413): n equals a,t,g, or c
  misc_feature (414): n equals a,t,g, or c
  misc_feature (427): n equals a,t,g, or c
  misc_feature (457): n equals a,t,g, or c
  misc_feature (492): n equals a,t,g, or c
  misc_feature (511): n equals a,t,g, or c
  misc_feature (513): n equals a,t,g, or c
  misc_feature (550): n equals a,t,g, or c
  misc_feature (552): n equals a,t,g, or c
  misc_feature (580): n equals a,t,g, or c
nggatttngccaagctctgaatcaanctcactaaagggaacaaaaggtggagctccaccgnggtggcggccgctctagaantactggatcccccgggttgcccgggttcggcganannggacaatntaggcnatgtagggtctggtcccccaaatccagatctgtcgnaaacantnttggatcaatacnttgccatggncncanaaaancatgggtncaacatggaacangctcttgggatgctcttctggcataancntaatatccaaaantcatnggctgatttgcccaacttnacccctttcccagataagtggactgtggaagataaantcttatttgancaagcctttacttttcatgggaaaacttttcatacaatccaaccaatgnttccacataaatctatagnnngtctggtgaaatnttactattcttggaaaaaagacgaagactnaaactattgtgatggatcgccatgccccggaaacnaaacgggacgggaagagancnacgatgaactggaacaagcaaatggaacaatcccatngnacttgaagttggatccaaaccaagaaanccaaagggaagtcccct

SEQ ID NO: 424 - DNA, 143 bp, Homo sapiens
  misc_feature (42): n equals a,t,g, or c
  misc_feature (92): n equals a,t,g, or c
  misc_feature (96): n equals a,t,g, or c
  misc_feature (99): n equals a,t,g, or c
  misc_feature (131): n equals a,t,g, or c
  misc_feature (138): n equals a,t,g, or c
gaacacatataagagcaaaatctggatcggcaggtgttacanacacaatgtatacgactggaggcccggtactacagcctcagcctgacggnacancanctctcccacatcgtggcggagttgaggaaccngaaacanaaaat

SEQ ID NO: 425 - DNA, 323 bp, Homo sapiens
  misc_feature (7): n equals a,t,g, or c
  misc_feature (291): n equals a,t,g, or c
gggcagnggagctctattgccaccatgagtttctccggcaagtaccaactgccagagccaggaaaactttgaagccttcatgaaggcaatcggtctgccggaagagctcatccagaaggggaaggatatcaagggggtgtcggaaatcgtgcagaatgggaagcacttcaagttcaccatcaccgctgggtccaaagtgatccaaaacgaattcacggtgggggaggaatgtgagctggagacaatgacaggggagaaagtcaagacagtggttcagttggaaggtgacantaaactggtgacaactttcaaaaacatcaagt

SEQ ID NO: 426 - DNA, 683 bp, Homo sapiens
  misc_feature (79): n equals a,t,g, or c
  misc_feature (94): n equals a,t,g, or c
  misc_feature (105): n equals a,t,g, or c
  misc_feature (112): n equals a,t,g, or c
  misc_feature (114): n equals a,t,g, or c
  misc_feature (120): n equals a,t,g, or c
  misc_feature (124): n equals a,t,g, or c
  misc_feature (129): n equals a,t,g, or c
  misc_feature (134): n equals a,t,g, or c
  misc_feature (136): n equals a,t,g, or c
  misc_feature (139): n equals a,t,g, or c
  misc_feature (158): n equals a,t,g, or c
  misc_feature (163): n equals a,t,g, or c
  misc_feature (188): n equals a,t,g, or c
  misc_feature (195): n equals a,t,g, or c
  misc_feature (206): n equals a,t,g, or c
  misc_feature (232): n equals a,t,g, or c
  misc_feature (234): n equals a,t,g, or c
  misc_feature (241): n equals a,t,g, or c
  misc_feature (251): n equals a,t,g, or c
  misc_feature (262): n equals a,t,g, or c
  misc_feature (264): n equals a,t,g, or c
  misc_feature (275): n equals a,t,g, or c
  misc_feature (286): n equals a,t,g, or c
  misc_feature (291): n equals a,t,g, or c
  misc_feature (301): n equals a,t,g, or c
  misc_feature (324): n equals a,t,g, or c
  misc_feature (326): n equals a,t,g, or c
  misc_feature (338): n equals a,t,g, or c
  misc_feature (348): n equals a,t,g, or c
  misc_feature (370): n equals a,t,g, or c
  misc_feature (387): n equals a,t,g, or c
  misc_feature (395): n equals a,t,g, or c
  misc_feature (399): n equals a,t,g, or c
  misc_feature (409): n equals a,t,g, or c
  misc_feature (418): n equals a,t,g, or c
  misc_feature (487): n equals a,t,g, or c
  misc_feature (536): n equals a,t,g, or c
  misc_feature (558): n equals a,t,g, or c
  misc_feature (578): n equals a,t,g, or c
  misc_feature (601): n equals a,t,g, or c
  misc_feature (607): n equals a,t,g, or c
  misc_feature (633): n equals a,t,g, or c
  misc_feature (648): n equals a,t,g, or c
  misc_feature (662): n equals a,t,g, or c
gaaaaaaaaaaaaaaaaaaaaaaaaaaaaaaaaaaaaaaaaaaaaaaaaaaaaaaaaaaaaaaaaaaaaaaaaaaaaangggcggccgttttanaggatccaagnttacgtncncgtgcntgcnacgtnatagntnttntatagggtcacctaaattnaattnactggccgtcgttttacaacgtcgngactggnaaaaccctggngttacccaacttaatcgccttgcagnanatccccntttcgccagntggcgtaatancnaaaaggcccgnaccgatcgccnttccnaacagttgcncagcctgaatggcaaatgggacncnccctgtagcggngcattaagcncggcgggtgtgggggttacccncagcgtgaccgttacanttgccagngccntagcgcccgntcctttcgntttcttcccttcctttttcgccacgttcgccggttttccccgtaaagctttaaatggggggctcccttnagggttccgatttagggctttacgggaccttgaccccaaaaaactttgnttagggggatggttcacgtagnggggccattgcccttgatanacgggtttttcgcccttttgacnttggantcccacgttttttaaataggggggcntttttgttccaaaantggggaacaaacantttaacccctttttttggggg

SEQ ID NO: 427 - DNA, 369 bp, Homo sapiens
  misc_feature (323): n equals a,t,g, or c
  misc_feature (337): n equals a,t,g, or c
  misc_feature (344): n equals a,t,g, or c
  misc_feature (349): n equals a,t,g, or c
  misc_feature (350): n equals a,t,g, or c
tgggcctgagatgcaggtaaaactgctccagtccctgggcctgaaatcaaccctcatcaccgatggctccactcccatcaacctcttcaacacagcctttgggctgctggggatggggcccgagggtccagcccctgggcagaaaggttggcattgggcccagccctggaagggggatatccccccagtcttgctcaagcccctcaagctcctggaaaacaccactttgtgcctgttctgcgcttactcctgattaatacaatgaattttcttgggcattttacaatttccaacactttaaaaaaaaaaaaaaaaaattcaangggggggccggttnccaattnccccnnttttatttcttttaaaatc

SEQ ID NO: 428 - DNA, 299 bp, Homo sapiens
  misc_feature (1): n equals a,t,g, or c
  misc_feature (79): n equals a,t,g, or c
  misc_feature (121): n equals a,t,g, or c
  misc_feature (295): n equals a,t,g, or c
ncctaatctcggaatcctaagtggtcgcctgaggaccggccggaattcccgggcacccacgcgtcggcggtagctgctnttcctggggcccgtgggcctcatcatgtacctcgggggcgtnttcttcatcaaccggcagcgctctagcactgccatgacagtgatggccgacctgggcgagcgcatggtcagggagaacctcaaagtgtggatctatcccgagggtactcgcaacgacaatggggacctgctgccttttaagaagggcgccttctacctggcagtccaggcacangtgc

SEQ ID NO: 429 - DNA, 538 bp, Homo sapiens
  misc_feature (124): n equals a,t,g, or c
  misc_feature (133): n equals a,t,g, or c
  misc_feature (325): n equals a,t,g, or c
  misc_feature (374): n equals a,t,g, or c
  misc_feature (376): n equals a,t,g, or c
  misc_feature (394): n equals a,t,g, or c
  misc_feature (397): n equals a,t,g, or c
  misc_feature (414): n equals a,t,g, or c
  misc_feature (432): n equals a,t,g, or c
  misc_feature (435): n equals a,t,g, or c
  misc_feature (440): n equals a,t,g, or c
  misc_feature (460): n equals a,t,g, or c
  misc_feature (472): n equals a,t,g, or c
  misc_feature (473): n equals a,t,g, or c
  misc_feature (482): n equals a,t,g, or c
  misc_feature (484): n equals a,t,g, or c
  misc_feature (498): n equals a,t,g, or c
  misc_feature (499): n equals a,t,g, or c
  misc_feature (529): n equals a,t,g, or c
gaagcagagatctgaagacagcatgtacacagccattccccagagtggctctccattcccaggctcagtgcaggatccaggcctgcatgtgtggcgggtggagaagctgaagccggtgcctgtngcgcaaganaaccagggcatcttcttctcgggggactcctacctagtgctgcacaatggcccagaagaggtttcccatctgcacctcaacacactgctgggagagcggcctgtgcagcaccgcgaggtaaggggcaatgagtctgacctcttcatgagctacttcccacggggcttcaagtaccaggaaggtggtttggantcagcatttcacaagacttccacaggagccccagttgccatcaagaaantntaccaggtgaaggggaanaanaaatccgtccaacgagngggcatgaattgggaaanttnaaatnggggttgtttacctggaatnggcaaaaatttnnctggtttgngnaatcaaatttggannaaaaggggggattgcctggatcgggatttncaaggaagc

SEQ ID NO: 430 - DNA, 552 bp, Homo sapiens
  misc_feature (434): n equals a,t,g, or c
  misc_feature (449): n equals a,t,g, or c
  misc_feature (505): n equals a,t,g, or c
  misc_feature (508): n equals a,t,g, or c
  misc_feature (514): n equals a,t,g, or c
  misc_feature (523): n equals a,t,g, or c
  misc_feature (535): n equals a,t,g, or c
gcggacacggacaggattgacagattgatagctctttctcgattccgtgggtggtggtgcatggccgttcttagttggtggagcgatttgtctggttaattccgataacgaacgagactctggcatgctaactagttacgcgacccccgagcggtcggcgtcccccaacttcttagagggacaagtggcgttcagccacccgagattgagcaataacaggtctgtgatgcccttagatgtccggggctgcacgcgcgctacactgactggctcagcgtgtgcctaccctacgccggcaggcgcgggtaacccgttgaaccccattcgtgatggggatcggggattgcaattattccccatgaacgaggaattcccagtaagtgcgggtcataagcttgcgttgattaagtccctgccccttcaacccttctggnccttcggaccactgngacttttccatctttcttaaacggaggctgggccttggggggggggctggcctggnttntgttgnccccaaganggtgctttcaanggtgaggaacttttttt

SEQ ID NO: 431 - DNA, 218 bp, Homo sapiens
  misc_feature (31): n equals a,t,g, or c
  misc_feature (36): n equals a,t,g, or c
  misc_feature (37): n equals a,t,g, or c
  misc_feature (43): n equals a,t,g, or c
  misc_feature (56): n equals a,t,g, or c
  misc_feature (60): n equals a,t,g, or c
  misc_feature (83): n equals a,t,g, or c
  misc_feature (104): n equals a,t,g, or c
  misc_feature (105): n equals a,t,g, or c
  misc_feature (107): n equals a,t,g, or c
  misc_feature (136): n equals a,t,g, or c
  misc_feature (143): n equals a,t,g, or c
  misc_feature (159): n equals a,t,g, or c
  misc_feature (168): n equals a,t,g, or c
  misc_feature (171): n equals a,t,g, or c
  misc_feature (181): n equals a,t,g, or c
  misc_feature (196): n equals a,t,g, or c
cccccggcctgcaggaaattcgagcagagtncacanngagggnaccaccgtcctgntctnccagttcgggttgaatgcaagtnctagccgatttttcctacaannantccagttgattacaattcttcctgtacgncagaganccctgcctttaaaagntgccaacgnttncctgacgagncctgcagccacagtncggcaattcctacaagtgccaa

SEQ ID NO: 432 - DNA, 610 bp, Homo sapiens
  misc_feature (401): n equals a,t,g, or c
  misc_feature (587): n equals a,t,g, or c
  misc_feature (590): n equals a,t,g, or c
  misc_feature (592): n equals a,t,g, or c
  misc_feature (593): n equals a,t,g, or c
  misc_feature (604): n equals a,t,g, or c
gcacacccctgggcgtccccgtcatccagccgtatcgcctggactccaaggtcaagcaaataggaggtggaattcagagcatcacctacacccacaacggagacatcagccgaaagcccaacacacgtaagcagaagaacggcttcccgcccaacttcatccactcgctggactcctcccacatgatgctcaccgccctgcactgctacaggaagggcctgaccttcgtctctgtgcacgactgttactggactcacgcagctgatgtctccgtcatgaaccaggtgtgccgggagcagtttgtccgcttgcacagcgagcccatcctgcaggacctgtccagattcctggtcaagcggttctgctctgagccccagaagatcttggaggccagccagctnaaggagacactgcaggcggtgcccaagccaggggccttcgacctggagcaggtgaagcgttccacctacttcttcagctgacaccccgtgagccttgtcagtgtgtaaataaagctcttttgccaccccaaaaaaaaaaaaaaaaaacttggggggggggcccgggacccaattgccctatagggnggngnnttacaattcantggccg

SEQ ID NO: 433 - DNA, 328 bp, Homo sapiens
  misc_feature (26): n equals a,t,g, or c
  misc_feature (123): n equals a,t,g, or c
  misc_feature (131): n equals a,t,g, or c
  misc_feature (132): n equals a,t,g, or c
  misc_feature (141): n equals a,t,g, or c
  misc_feature (222): n equals a,t,g, or c
  misc_feature (223): n equals a,t,g, or c
  misc_feature (225): n equals a,t,g, or c
  misc_feature (244): n equals a,t,g, or c
  misc_feature (249): n equals a,t,g, or c
  misc_feature (266): n equals a,t,g, or c
  misc_feature (291): n equals a,t,g, or c
  misc_feature (314): n equals a,t,g, or c
caaatgtatggaactaacaagatggntccatatcgagattcaaagttaacccatctgttcaagaactactttgatggggaaggaaaagtgcggatgatcgtgtatgtgaaccccaaggctgangattatgnngaaaacttncaagtcatgagatttgcggaagtgactcaagaagttgaagtagcaagacctgtagacaaggtaatatgtggtttaacgccnngnaggagatacagaaaccagnctcgnggtccagttggaaatgnaccattgggtactgacgtggttttncagagttttccacctttgccgtncatgcgaaattttt

SEQ ID NO: 434 - DNA, 535 bp, Homo sapiens
  misc_feature (76): n equals a,t,g, or c
  misc_feature (77): n equals a,t,g, or c
  misc_feature (274): n equals a,t,g, or c
  misc_feature (351): n equals a,t,g, or c
  misc_feature (405): n equals a,t,g, or c
  misc_feature (454): n equals a,t,g, or c
  misc_feature (491): n equals a,t,g, or c
  misc_feature (504): n equals a,t,g, or c
  misc_feature (512): n equals a,t,g, or c
  misc_feature (517): n equals a,t,g, or c
gggttcgacccacgcgtccgaggctgaacaggacagaaagatagaagaagtcagagatgccatggaaaatgaaatnngaaactctctgaacaagaattacaatttcgtcgtctcagtcaagagcaagttgacaactttactctggatataaatactgcctatgccagactcagaggaatcgaacaggctgttcagagccatgcagttgctgaagaggaagccagaaaagcccaccaactctggctttcagtggaggcattaaagtacagcatgnaagacctccatctggcagaaacacctactatcccgctgggtagtggcagttgaagcccatccaaagccaactgttcnggataatgaatttcacccaagctttaaccgcagctattcccttccagagttccnggacccgtggggtggttacatggaagagaacccttagggcccgttttcncatggtggtttccaaaaattgggccccgagggtaggnccaatggattggnttggaaancccgnaattagcttgttacccgt

SEQ ID NO: 435 - DNA, 524 bp, Homo sapiens
  misc_feature (110): n equals a,t,g, or c
  misc_feature (138): n equals a,t,g, or c
  misc_feature (154): n equals a,t,g, or c
  misc_feature (157): n equals a,t,g, or c
  misc_feature (238): n equals a,t,g, or c
  misc_feature (258): n equals a,t,g, or c
  misc_feature (259): n equals a,t,g, or c
  misc_feature (262): n equals a,t,g, or c
  misc_feature (269): n equals a,t,g, or c
  misc_feature (279): n equals a,t,g, or c
  misc_feature (308): n equals a,t,g, or c
  misc_feature (337): n equals a,t,g, or c
  misc_feature (338): n equals a,t,g, or c
  misc_feature (339): n equals a,t,g, or c
  misc_feature (340): n equals a,t,g, or c
  misc_feature (341): n equals a,t,g, or c
  misc_feature (342): n equals a,t,g, or c
  misc_feature (343): n equals a,t,g, or c
  misc_feature (344): n equals a,t,g, or c
  misc_feature (345): n equals a,t,g, or c
  misc_feature (347): n equals a,t,g, or c
  misc_feature (348): n equals a,t,g, or c
  misc_feature (350): n equals a,t,g, or c
  misc_feature (354): n equals a,t,g, or c
  misc_feature (375): n equals a,t,g, or c
  misc_feature (380): n equals a,t,g, or c
  misc_feature (498): n equals a,t,g, or c
  misc_feature (500): n equals a,t,g, or c
  misc_feature (518): n equals a,t,g, or c
ccctgctccaccgtccccgtcaccacggaggtttcgtacgccggctgcaccaagaccgtcctcatgaatcattgctccgggtcctgcgggacatttgtcatgtactcggnccaagcccaggccctggaccacagcttnctcctgctgcaaaganganaaaaccagccagcgtgaggttggtcctgagcttgccccaatggcggctcgcttgacacacacctacacccacatcgaaganctgccagtgccaagaacacnntcntgggggnttccccaacnggaacttcccgccggggccggggggcttnccccttagcatctggaacgtaggtttttnnnnnnnnngnnanaaanccccctttcaattgcccttcnaaaanttttacctccccccgaacctctttaaactccttaaactcgggttcctcttcttccaaatattatgttctaattttttttttcatccctgctttcccaatataaactcagggggaaatncnaaaaaaaaaaaaatccangggggg

SEQ ID NO: 436 - DNA, 384 bp, Homo sapiens
  misc_feature (5): n equals a,t,g, or c
  misc_feature (79): n equals a,t,g, or c
  misc_feature (124): n equals a,t,g, or c
  misc_feature (177): n equals a,t,g, or c
  misc_feature (191): n equals a,t,g, or c
  misc_feature (215): n equals a,t,g, or c
  misc_feature (320): n equals a,t,g, or c
  misc_feature (341): n equals a,t,g, or c
  misc_feature (349): n equals a,t,g, or c
  misc_feature (366): n equals a,t,g, or c
  misc_feature (374): n equals a,t,g, or c
ggcanaggatcaggctggagaagtggatcacaccttgttgggacaatgcacaggtggcggttacttcatgcagttcagnaccagctcggggtccgcggaagaggcagccctactggagtctcgnattctttacccaaagaggaagcagcagtgcctgcaatttttctataaaatgancggggaagtccttncagacagacttcgttgtctgggtncaggaggggatgacagcacaggcaatgttcgcaattggtgaaggtgcagacttttcaaggagatgatgaccacaatttggaaaattggcccatgtgggtgcttcnaagaggaacagaatttcggtnaccttttnccaggggcacaaaaggnggaccttnagagcttcaa

SEQ ID NO: 437 - DNA, 390 bp, Homo sapiens
  misc_feature (304): n equals a,t,g, or c
  misc_feature (317): n equals a,t,g, or c
  misc_feature (372): n equals a,t,g, or c
  misc_feature (385): n equals a,t,g, or c
  misc_feature (386): n equals a,t,g, or c
  misc_feature (390): n equals a,t,g, or c
cttgctcaatgacgccgtcactgtggtcctgtatcacctctttgaggagtttgccaactacgaacacgtgggcatcgtggacatcttcctcggcttcctgagcttcttcgtggtggccctgggcggggtgcttgtgggcgtggtctacggggtcatcgcagccttcacctcccgatttacctcccacatccgggtcatcgagccgctcttcgtcttcctctacagctacatggcctacttgtcagccgagctcttccacctgtcaggcatcatggcgctcatagcctcaggagtggtgatgcgnccctatgtgggangccaacacttccacaagttcccacaacaacatcaaataatttcctggaagatgtnggagcagcgtcannaagn

SEQ ID NO: 438 - DNA, 234 bp, Homo sapiens
  misc_feature (1): n equals a,t,g, or c
  misc_feature (21): n equals a,t,g, or c
  misc_feature (24): n equals a,t,g, or c
  misc_feature (47): n equals a,t,g, or c
  misc_feature (82): n equals a,t,g, or c
  misc_feature (114): n equals a,t,g, or c
nccccggacttttagtgtaangcncctaccccctgcaggtaccggtncggaattcccgggtttgactccacgcgttttgctncattaacaacataaaaccctcatggacacganaaaacaccctcatgttcatacacctatcccccattctcctcctatccctcaaccccgacatcattaccgggttttcctcttaaaaaaaaaaaaaaaaaaaaaaaaaaaaaaaaaaaaaaa

SEQ ID NO: 439 - DNA, 144 bp, Homo sapiens
  misc_feature (1): n equals a,t,g, or c
  misc_feature (2): n equals a,t,g, or c
  misc_feature (36): n equals a,t,g, or c
  misc_feature (43): n equals a,t,g, or c
  misc_feature (105): n equals a,t,g, or c
  misc_feature (114): n equals a,t,g, or c
  misc_feature (135): n equals a,t,g, or c
nnctatcgatggggagcaagagtcttttaaataagnccatttnagtccctggttaacaagggtttaaagtggagcgaatgcacatcacagacatgaaattggctnacctgcctngcttagaagcccttggtgttnaggtcaaca

SEQ ID NO: 440 - DNA, 411 bp, Homo sapiens
  misc_feature (69): n equals a,t,g, or c
  misc_feature (86): n equals a,t,g, or c
  misc_feature (132): n equals a,t,g, or c
  misc_feature (209): n equals a,t,g, or c
  misc_feature (230): n equals a,t,g, or c
  misc_feature (246): n equals a,t,g, or c
  misc_feature (276): n equals a,t,g, or c
  misc_feature (340): n equals a,t,g, or c
  misc_feature (346): n equals a,t,g, or c
  misc_feature (390): n equals a,t,g, or c
  misc_feature (404): n equals a,t,g, or c
  misc_feature (410): n equals a,t,g, or c
gccaaggtccaccccaactctgtgcacatctgtgcggtggttgtggagtacgagaccaaggctggccgnatcaacaagggcgtggncaccaactggctgcgggccaaggagcctgccggggagaacggcggncgcgcgctggtgcccatgttcgtgcgcaagtcccagttccgcctgcccttcaaggccaccacgcctgtcatcatggngggccccggcaccggggtgtnacccttcataggcttnatccaggagcgggcctggctgcgacagcanggcaaggaggtgggggagacgctgctgaactacggctgccgccgctcggatgaggactacctgnaccggnaggagctggcgcagttccacagggacggtgcgctcacccagctnaacgtggccttctnccgggna

SEQ ID NO: 441 - DNA, 623 bp, Homo sapiens
  misc_feature (9): n equals a,t,g, or c
  misc_feature (73): n equals a,t,g, or c
  misc_feature (141): n equals a,t,g, or c
  misc_feature (162): n equals a,t,g, or c
  misc_feature (232): n equals a,t,g, or c
  misc_feature (252): n equals a,t,g, or c
  misc_feature (289): n equals a,t,g, or c
  misc_feature (360): n equals a,t,g, or c
  misc_feature (365): n equals a,t,g, or c
  misc_feature (407): n equals a,t,g, or c
  misc_feature (435): n equals a,t,g, or c
  misc_feature (449): n equals a,t,g, or c
  misc_feature (472): n equals a,t,g, or c
  misc_feature (495): n equals a,t,g, or c
  misc_feature (502): n equals a,t,g, or c
  misc_feature (504): n equals a,t,g, or c
  misc_feature (509): n equals a,t,g, or c
  misc_feature (538): n equals a,t,g, or c
  misc_feature (560): n equals a,t,g, or c
  misc_feature (586): n equals a,t,g, or c
  misc_feature (587): n equals a,t,g, or c
  misc_feature (619): n equals a,t,g, or c
gccagcagncaccacagcgcctgcttcctcggccctgaaatcatgcccctaggtctcctgtggctgggcctanccctgttgggggctctgcatgcccaggcccaggactccacctcagacctgatcccagccccacctctnagcaaggtccctctgcagcanaacttccacgacaaccaattccacgggaagtggtatgtggtacgcctggcacggaatgcaattctcaganaacacaaagacccgcaaaanatgtatgccaccatctatgagctgaaggaaacaaganctacaatgtccctccgcctgtttaagaaaaaaaaatgtgactacttggatcaggaattttggtccaaggtngccanccggcgaattccaccttggggacctttaaaattgccttggantaaccaatttcctccttccaattgttancaccaattacaacngccttcttttggttttcttccanaaaatttctccaaacaaggaatncttccananccccncttccggaaaaacaaggaattaattccgnacttaaaggaaaaattctccgntctcccatttcttgggccccctaaanncaaattcgtcttcccttttccaaccaacattntttt

SEQ ID NO: 442 - DNA, 211 bp, Homo sapiens
  misc_feature (47): n equals a,t,g, or c
  misc_feature (58): n equals a,t,g, or c
  misc_feature (77): n equals a,t,g, or c
  misc_feature (93): n equals a,t,g, or c
  misc_feature (121): n equals a,t,g, or c
  misc_feature (131): n equals a,t,g, or c
  misc_feature (178): n equals a,t,g, or c
  misc_feature (195): n equals a,t,g, or c
  misc_feature (207): n equals a,t,g, or c
tgggcagccacactgcacgcaggctgggccgactgaggggctcagangccaggctctnaggcccacgcagggcctanggtgggaagatggcangtgggggcggcgacctgagcaccaggangctgaatgantgtatttcaccagtagcaaatgagatgaaccatcttcctgcacacanccacgatttgcaaaggntgttcacggaanacca

SEQ ID NO: 443 - DNA, 399 bp, Homo sapiens
  misc_feature (316): n equals a,t,g, or c
  misc_feature (347): n equals a,t,g, or c
  misc_feature (358): n equals a,t,g, or c
  misc_feature (376): n equals a,t,g, or c
  misc_feature (391): n equals a,t,g, or c
gtctgagtggatggacactgcctcttagaactagaacttagaactttatcttgaaaatgtaccactgttgcagaagctcctcacagagtatgtgtcaggcatttttaacctgctaaaggcaagaagaagtgttcaccacatagttgcaaaggtcttcaacttgccacagccaacagaaaaatcaaaatgattgaaccctttgggaatcaagtatattgtggccaggccagtgtattctacaaatgcttttgaggaaaatcataaaaagacaggaagacatcataagacatttctggatcatctcaaagtgtgttgnaactgttccccacaaaaggcaagagaattgncctctctttgnttcccatagcattttggntgccagcataccggnttaaagaa

SEQ ID NO: 444 - DNA, 465 bp, Homo sapiens
  misc_feature (376): n equals a,t,g, or c
  misc_feature (390): n equals a,t,g, or c
gcgggactccaaatgggtcgcagtcgcagccgctctccacggagggaacgtaggcgttcccggtccacatcccgggagagagaacgcaggcgccgagaaaggtccaggtctcgggagagagatcggagaaggagccgctcgcgatccccgcaccgaagacgctcccgatctccaagacgacatagatccacatctccttccccttctcgactgaaagaaagaagagatgaggaaaagaaagaaacaaaagaaacaaagagcaaagaacggcagattactgaggaagacttagagggcaaaacagaggaagaaatagaaatgatgaagttaatgggatttgcctcctttgactccacaaaaggtaagaaggtggatngctctgtaaatgcntatgccataaatgtctctcagaagaggaagtacaggtatgcatagcccccatttttgtttgaactaataaatcag

SEQ ID NO: 445 - DNA, 297 bp, Homo sapiens
  misc_feature (7): n equals a,t,g, or c
ggcagtntctctgccaggctggggatgattccaatagtaataagaagaatgctgacctccaagtgctaaagcccgagcccgagctggtttatgaagacctgaggggctcagtgaccttccactgtgccctgggccctgaggtggcaaacgtggccaaaattctgtctggcagagagtggggaaaagacgcggtttccagcttgcagatttgttaagtttctcaggcagattttgactttcagcctttcatacttgtttaagcaactatttgtattaaatgaagttttttgaaaaaca

SEQ ID NO: 446 - DNA, 448 bp, Homo sapiens
  misc_feature (21): n equals a,t,g, or c
  misc_feature (22): n equals a,t,g, or c
  misc_feature (24): n equals a,t,g, or c
  misc_feature (306): n equals a,t,g, or c
  misc_feature (366): n equals a,t,g, or c
  misc_feature (369): n equals a,t,g, or c
  misc_feature (435): n equals a,t,g, or c
  misc_feature (440): n equals a,t,g, or c
  misc_feature (448): n equals a,t,g, or c
tcgacccacgcgtccgccgannanagtttggttttgcggattgccaccgatgattccaaagcagtctgtcgcctcagtgttaaattcggggccacactcaaaatcagcaggcttctcttggaacgggcgagagagctgaatattgacatcatcggtgtcagcttccacgtgggaagtggctgcaccgatcctggagaccttcgtgcaagccatctccgatgcccgctgtgtcttcgacatggggagctgaggttggtttcaacatgtatctgcttgatatcggtggtgggctttcctgggatctgnaggatgtgaaacttaaatttggaagagatcaccatgttatcaacccagccctgggacaantanttcccgggccgaattcgggcgtggacattcatagccgagcccgggcaggataattaagttggcttncagcnttcaagcn

SEQ ID NO: 447 - DNA, 268 bp, Homo sapiens
  misc_feature (10): n equals a,t,g, or c
  misc_feature (21): n equals a,t,g, or c
  misc_feature (36): n equals a,t,g, or c
  misc_feature (43): n equals a,t,g, or c
  misc_feature (45): n equals a,t,g, or c
  misc_feature (60): n equals a,t,g, or c
  misc_feature (99): n equals a,t,g, or c
  misc_feature (132): n equals a,t,g, or c
  misc_feature (135): n equals a,t,g, or c
  misc_feature (140): n equals a,t,g, or c
  misc_feature (141): n equals a,t,g, or c
  misc_feature (159): n equals a,t,g, or c
  misc_feature (183): n equals a,t,g, or c
  misc_feature (192): n equals a,t,g, or c
  misc_feature (206): n equals a,t,g, or c
  misc_feature (222): n equals a,t,g, or c
  misc_feature (243): n equals a,t,g, or c
  misc_feature (260): n equals a,t,g, or c
  misc_feature (262): n equals a,t,g, or c
ggcacgaggnagtgtcccagncgggttcgtgtcgcnatggggnanatcgagtgggccatntgggccaacgagcaggcgctggcgtccggcctaatcctnatcaccgggggcatcgtggccacagctgggcgnttnacccnntggtactttggtgcctantccattgtggcgggcgtgtttgtntgcctgctngagtacccccgggnaaagaggaagaagggntccaccatggtgcgatggggncagaagtacatgaccgncntggtga

SEQ ID NO: 448 - DNA, 425 bp, Homo sapiens
gacaccttcatccgtcacatcgccctgctgggctttgagaagcgcttcgtacccagccagcactatgtacatgttcctggtgaaatggcaggacctgtcggagaaggtggtctaccggcgcttcaccgagatctacgagttccatctcccaagtggtttgacgggcagcgggccgccgagaaccaccagggcacacttaccgagtactgcggcacgctcatgagcctgcccaccaagatctcccgctgtccccacctcctcgacttcttcaaggtgcgccctgatgacctcaagctccccacggacaaccagacaaaaaagccagagacatacttgatgcccaaagatggcaagagtaccgcgacagacatcaccggccccatcatcctgcagacgtaccgcgccattgccaactacgagaagac

SEQ ID NO: 449 - DNA, 88 bp, Homo sapiens
  misc_feature (25): n equals a,t,g, or c
  misc_feature (26): n equals a,t,g, or c
  misc_feature (71): n equals a,t,g, or c
  misc_feature (73): n equals a,t,g, or c
tcgttgccctgttactgtctgtggnnatgtgcatggtcaatttcatgatcttatggaactctttagaattngnggaaaatcaccggat

SEQ ID NO: 450 - DNA, 214 bp, Homo sapiens
  misc_feature (8): n equals a,t,g, or c
  misc_feature (26): n equals a,t,g, or c
  misc_feature (31): n equals a,t,g, or c
  misc_feature (49): n equals a,t,g, or c
  misc_feature (53): n equals a,t,g, or c
  misc_feature (68): n equals a,t,g, or c
  misc_feature (71): n equals a,t,g, or c
  misc_feature (75): n equals a,t,g, or c
  misc_feature (89): n equals a,t,g, or c
  misc_feature (91): n equals a,t,g, or c
  misc_feature (102): n equals a,t,g, or c
  misc_feature (108): n equals a,t,g, or c
  misc_feature (113): n equals a,t,g, or c
  misc_feature (114): n equals a,t,g, or c
  misc_feature (141): n equals a,t,g, or c
  misc_feature (154): n equals a,t,g, or c
  misc_feature (193): n equals a,t,g, or c
  misc_feature (204): n equals a,t,g, or c
  misc_feature (205): n equals a,t,g, or c
atctccantggaaccacgttgtggcngatgntggggctttcctgcggtncaangagcccttaccggantangtgnggatggtgactgantnttcaaataaantacganactgnnccaacctctctgccacggacatccaantgcttgcacgcanataccagttggaagcagagtttgttggggtgtctcaacnaaaagttgagnnaagcaacgt

SEQ ID NO: 451 - DNA, 473 bp, Homo sapiens
  misc_feature (370): n equals a,t,g, or c
  misc_feature (444): n equals a,t,g, or c
  misc_feature (469): n equals a,t,g, or c
gcggacgcgtggggcaagacttttgcccggtacctttcattccggcgtgacaacaatgagctgttgctcttcatactgaagcagttagtggcagagcaggtgacatatcagcgcaaccgctttggggcccagcaggacactattgaggtccctgagaaggacttggtggataaggctcgtcagatcaacatccacaacctctctgcattttatgacagtgagctcttcaggatgaacaagttcagccacgacctgaaaaggaaaatgatcctgcagcagttctgaggccctatgccatccataaggattccttgggattctggtttggggtggtcagtgccctctgtgctttatggacacaaaaccagancacttgatgaactcggggtactagggtcagggcttatagcaggatgtctggctgcacctggcatgactgtttgnttctccaacctgctttgtgcttctnacct

SEQ ID NO: 452 - DNA, 397 bp, Homo sapiens
  misc_feature (29): n equals a,t,g, or c
  misc_feature (225): n equals a,t,g, or c
  misc_feature (330): n equals a,t,g, or c
  misc_feature (376): n equals a,t,g, or c
  misc_feature (385): n equals a,t,g, or c
  misc_feature (387): n equals a,t,g, or c
  misc_feature (389): n equals a,t,g, or c
gggtcgacccacgcgtccgcccacgctcncgcttgcttggacatcaggtaccaactgcactcgttttggcattgcagctaaatatcagttggatcccactgcttccatttctgcaaaagtcaacaactctagcttaattggagtaggctatactcagactctgaggcctggtgtgaagcttacactctctggctctggtagatgggaagagcattaaatgctggnaggccacaaggttggggctcgccctgggagttgggaggcttaatccagctgaaagaaacctttggggaatgggatatccagaagatttgggccttaatataattnccattgtggaccagcagcaggctttttttccccccaagaagattgntccaaaccnangntgatctcc

SEQ ID NO: 453 - DNA, 463 bp, Homo sapiens
  misc_feature (315): n equals a,t,g, or c
  misc_feature (393): n equals a,t,g, or c
  misc_feature (404): n equals a,t,g, or c
  misc_feature (426): n equals a,t,g, or c
  misc_feature (435): n equals a,t,g, or c
  misc_feature (453): n equals a,t,g, or c
ggcaagatggtgttgcagacccaggtcttcatttctctgttgctctggatctctggtgcctacggggacatcgtgatgacccagtctccagactccctggctgtgtctctgggcgagagggccaccatcaactgcaagtccagccagagtgttttatacagctccaacaataagaactacttaacttggtaccagcagaaaccaggacagcctcctaagctgctcctttactgggcatctacccgggaatccggggtccctgaccgattcagtggcagcgggtctgggacagatttcactctcaccatcagcagnctgcaggctgaagatgtggcagattattactgtcagcaatattatactactccctggacgttcggccactggaccaangtggaaatcanacgaaactgtggctgcaccatntgcctcatntttccgccatctggtgancagttgaaat

SEQ ID NO: 454 - DNA, 332 bp, Homo sapiens
  misc_feature (95): n equals a,t,g, or c
  misc_feature (332): n equals a,t,g, or c
tggctcatcttggctgtgatttcagtatatgatttagtggctgttttgtgtccgaaaggtccacttcgtatgctggttgaaacagctcaggaganaaatgaaacgctttttccagctctcatttactcctcaacaatggtgtggttggtgaatatggcagaaggagacccggaagctcaaaggagagtatccaaaaattccaagtataatgcagaaagcacagaaaggagtcacaagacactgttgcagagaatgatgatggcgggttcagtgaggaatgggaagcccagaaggacagtcatctagggcctcatcgctctacacctgaatcn

SEQ ID NO: 455 - DNA, 429 bp, Homo sapiens
  misc_feature (4): n equals a,t,g, or c
  misc_feature (11): n equals a,t,g, or c
  misc_feature (12): n equals a,t,g, or c
  misc_feature (99): n equals a,t,g, or c
  misc_feature (105): n equals a,t,g, or c
  misc_feature (107): n equals a,t,g, or c
  misc_feature (109): n equals a,t,g, or c
  misc_feature (143): n equals a,t,g, or c
  misc_feature (148): n equals a,t,g, or c
  misc_feature (158): n equals a,t,g, or c
  misc_feature (172): n equals a,t,g, or c
  misc_feature (243): n equals a,t,g, or c
  misc_feature (271): n equals a,t,g, or c
  misc_feature (274): n equals a,t,g, or c
  misc_feature (292): n equals a,t,g, or c
  misc_feature (314): n equals a,t,g, or c
  misc_feature (346): n equals a,t,g, or c
  misc_feature (382): n equals a,t,g, or c
  misc_feature (392): n equals a,t,g, or c
ggcnagtagtnnggggtcccagggtttgtttttaaagtagtgacttctaccaacatgtcccgtggttccagagagcggttttgaccgccacattaccantttttnancngagggtcggctctaccaagtaggaatatgctttnaaggntattaaccanggtggacttacatnagtagctgatcagcgggaaagactgtgcagtaattgtcacacagaagaaagtacctgacaaattattggantccagcacagtgactcacttattcaagntanctggaaacattggttgtntgaagaccggaatgtcagctgncagcagatcccaggtacagagggcacgctatnaggcagctaacttggaatacaagtatggctatgagnttcctgtggncatgcctgtgtaaaaggatttccggtatttctcaggt

SEQ ID NO: 456 - DNA, 623 bp, Homo sapiens
  misc_feature (38): n equals a,t,g, or c
  misc_feature (352): n equals a,t,g, or c
  misc_feature (482): n equals a,t,g, or c
  misc_feature (516): n equals a,t,g, or c
  misc_feature (540): n equals a,t,g, or c
  misc_feature (554): n equals a,t,g, or c
  misc_feature (570): n equals a,t,g, or c
  misc_feature (588): n equals a,t,g, or c
  misc_feature (604): n equals a,t,g, or c
tggcggcttccttcacccgcaacccgagagacgacccnccgggcccgccccgcggaagccgccggttgccaggccaaggagtggactagggtcgccggggaagcggtttgggagagcccatggtgactgcgtgagtggagcccagctgtgtggatgccccagcatggatgactacatggtcctgagaatgattggggagggctcgttcggcagagctcttttggttcaacatgaaagcagtaatcaagatgtttgccatgaaagaaataaggcttccaagtctttctctaatacacagaattctaggaaggaggctgttcttttagccaaaatgaaacaccctaatattggngccttcaaagaatcatttgaaagctgcaggacacttgtatattgtgatggaatactgtgatggacgggatctaatgcaaaagattaaacagcagaaaaggaaaagttatttcctgaagacatgatacttnaatggtttacccaaatgtgccttggagtaaaatnacatttaccaagaaacgtgtgctncccaagagattttnaaagtcccaaaaaatntttttccttaacctcaanaattgggaaaaagttnaaaattggggaaaaacttt

SEQ ID NO: 457 - DNA, 441 bp, Homo sapiens
  misc_feature (5): n equals a,t,g, or c
  misc_feature (13): n equals a,t,g, or c
  misc_feature (16): n equals a,t,g, or c
  misc_feature (20): n equals a,t,g, or c
  misc_feature (28): n equals a,t,g, or c
  misc_feature (185): n equals a,t,g, or c
  misc_feature (223): n equals a,t,g, or c
  misc_feature (233): n equals a,t,g, or c
  misc_feature (250): n equals a,t,g, or c
  misc_feature (391): n equals a,t,g, or c
  misc_feature (399): n equals a,t,g, or c
  misc_feature (417): n equals a,t,g, or c
  misc_feature (432): n equals a,t,g, or c
atccngaaactgnaanccgntgtgtcanctgaaaaaccattcggtgtgtctgcacttggaggctgcacttgcttgcttccacttatgcttgttctcagaacacaaacaaaacctgtgaagagtgcctgaaaaacgtctcctgtctttggtgcaacactaacaagcttgtcttggactaccagttncaaagtcttgccaccggcttccctttgttaattaactncttgcacctngggaattttgttgggtnaaacttagaagcgctgaatcatcacatgttcggtagtccggggaaccctcctcctggggcattggcatctgctgcttgcttgcttgctgcaagaagaaaaaaagaacccgaaacccggacaggaattaaagaaaaaaggcnttgcgttnaaccggaaagaaaaagcngaataccggccggangaacggaaa

SEQ ID NO: 458 - DNA, 419 bp, Homo sapiens
  misc_feature (1): n equals a,t,g, or c
  misc_feature (8): n equals a,t,g, or c
  misc_feature (252): n equals a,t,g, or c
  misc_feature (278): n equals a,t,g, or c
  misc_feature (306): n equals a,t,g, or c
  misc_feature (402): n equals a,t,g, or c
  misc_feature (404): n equals a,t,g, or c
  misc_feature (408): n equals a,t,g, or c
  misc_feature (409): n equals a,t,g, or c
  misc_feature (410): n equals a,t,g, or c
ncttcctntaggagcaggagggatgagcaagggtctcccagcgcgacaggacatggagaaagagcgagagactctgcaggcctggaaggagcgcgtggggcaggagctggaccgcgtggtggctttctggatggagcactcccacgaccaggagcacgggggcttcttcacgtgccttggccgcgaggggcgggtgtatgatgacctcaagtatgtgtggctgcaggggaggcaggtatggatgtattgtcngcctgtaccgcactttcgagcgcttncgccatgctcagcttctggacgcagcanaagcaggtggtgagttcttgctgcggtatgcccgggtggcaccttctggcaagaagtgtgcctttgtgctgactcggtgacggccgcccggtcaangngcannnaaccatctt

SEQ ID NO: 459 - DNA, 509 bp, Homo sapiens
  misc_feature (21): n equals a,t,g, or c
  misc_feature (40): n equals a,t,g, or c
  misc_feature (284): n equals a,t,g, or c
  misc_feature (308): n equals a,t,g, or c
  misc_feature (331): n equals a,t,g, or c
  misc_feature (369): n equals a,t,g, or c
  misc_feature (377): n equals a,t,g, or c
  misc_feature (393): n equals a,t,g, or c
  misc_feature (405): n equals a,t,g, or c
  misc_feature (410): n equals a,t,g, or c
  misc_feature (414): n equals a,t,g, or c
  misc_feature (419): n equals a,t,g, or c
  misc_feature (424): n equals a,t,g, or c
  misc_feature (440): n equals a,t,g, or c
  misc_feature (472): n equals a,t,g, or c
  misc_feature (485): n equals a,t,g, or c
  misc_feature (490): n equals a,t,g, or c
  misc_feature (493): n equals a,t,g, or c
  misc_feature (499): n equals a,t,g, or c
  misc_feature (502): n equals a,t,g, or c
aattcggcacgagctgaagtnactgatgagtataaaaatnatgtaaaaaacagatctgtttatattaaaggcttcccaactgatgcaactcttgatgacataaaagaatggttagaagataaaggtcaagtactaaatattcagatgagaagaacattgcataaagcatttaagggatcaatttttgttgtgtttgatagcattgaatctgctaagaaatttgtagaggcccctggccagaagtacaaagaaccagacctgctaatacttttcaaggccggttnctttgccaaaaaatgaggaagaancaaataagtggagctaattaggnttacagggcagagcaaccaagttgaggagtcctgatgnactctggngaagttggtccttctnatttcggggttngtgcngccntgggngttcncacttttcatcagggntaatgtgctcccaggccagggtttttttaganccggcttgtaccngtcantgncccctngcnggtcttg

SEQ ID NO: 460 - DNA, 468 bp, Homo sapiens
  misc_feature (20): n equals a,t,g, or c
  misc_feature (445): n equals a,t,g, or c
  misc_feature (450): n equals a,t,g, or c
  misc_feature (459): n equals a,t,g, or c
  misc_feature (465): n equals a,t,g, or c
  misc_feature (468): n equals a,t,g, or c
cgccttttggtaccggtccngaattcccggggcttccctcctcttcctttcttcgccatcgtggtgtgttcttgactccgctgctcgccatgtcttctcacaagactttcaggattaagcgattcctggccaagaaacaaaagcaaaatcgtcccattccccagtggattcggatgaaaactggaaataaaatcaggtacaactccaaaaggagacattggagaagaaccaagctgggtctataaggaattgcacatgagatggcacacatatttatgctgtctgaaggtcacgatcatgttaccatatcaagctgaaaatgtcaccactatctggagatttcgacgtgttttcctctctgaatctgttatgaacacgttggttggctggattcagtaataaatatgtaaggcctttctttttaaaaaaaaaaaaaaaaaaaaanaaaanacaaaaaanatcaanaan

SEQ ID NO: 461 - DNA, 580 bp, Homo sapiens
  misc_feature (9): n equals a,t,g, or c
  misc_feature (18): n equals a,t,g, or c
  misc_feature (54): n equals a,t,g, or c
  misc_feature (249): n equals a,t,g, or c
  misc_feature (340): n equals a,t,g, or c
  misc_feature (427): n equals a,t,g, or c
  misc_feature (433): n equals a,t,g, or c
  misc_feature (452): n equals a,t,g, or c
  misc_feature (462): n equals a,t,g, or c
  misc_feature (466): n equals a,t,g, or c
  misc_feature (470): n equals a,t,g, or c
  misc_feature (472): n equals a,t,g, or c
  misc_feature (478): n equals a,t,g, or c
  misc_feature (509): n equals a,t,g, or c
  misc_feature (510): n equals a,t,g, or c
  misc_feature (556): n equals a,t,g, or c
  misc_feature (567): n equals a,t,g, or c
  misc_feature (575): n equals a,t,g, or c
ggggggggngggggggtnttaggtttgcctaaaaatatttaggtgacactatanaaggtacgcctgcaggtaccggtccggaattcccgggtcgacccacgcgtccgtcgacccacgcgtccgcccacgcgtccgcccacgcgtccgcccacgcgtccgctgtgtcgtaaaatgggggtcccttactgcattatcaagggaaaggcaagactgggacgtctagtccacaggaagacctgcaccactgtngccttcacacaggtgaactcggaaagacaaaggcgctttggctaagctggtggaagctatcaggaccaattacaatgacagatacgatganatccgcccgtccactggggttggcaatgttccctgggtccctaattcttgttgctccgtatcgcccaactccgaaaaaggcaaaagnttaaanaactttgccacttaaactngggttaaatnttcnctgntnaatttnccctgttcccttaaaaataattgaaattatnnaatttccccctccccaaaaaaaaaaaaaaaggggggccccttaaanattcccccccnaaggggcnaatta

SEQ ID NO: 462 - DNA, 549 bp, Homo sapiens
  misc_feature (3): n equals a,t,g, or c
  misc_feature (5): n equals a,t,g, or c
  misc_feature (8): n equals a,t,g, or c
  misc_feature (11): n equals a,t,g, or c
  misc_feature (13): n equals a,t,g, or c
acngnganacnancctcactaaagggaacaaaagctggagctccaccgcggtgcggccgctctagaactagtggatcccccgggctgcaggaattcggcacgaggcgccgccacaatggtgcgcatgaatgtcctggcagatgctctcaagagtatcaacaatgccgaaaagagaggcaaacgccaggtgcttattaggccgtgctccaaagtcatcgtccggtttctcactgtgatgatgaagcatggttacattggcgaatttgaaatcattgatgaccacagagctgggaaaattgttgtgaacctcacaggcaggctaaacaagtgtggggtgatcagccccagatttgacgtgcaactcaaagacctggaaaaatggcagaataatctgcttccatcccgccagtttggtttcattgtactgacaacctcagctggcatcatggaccatgaagaagcaagacgaaaacacacaggagggaaaatcctgggattctttttctagggatgtaatacatatatttacaaataaaatgcctcatggac

SEQ ID NO: 463 - DNA, 480 bp, Homo sapiens
  misc_feature (7): n equals a,t,g, or c
  misc_feature (130): n equals a,t,g, or c
  misc_feature (320): n equals a,t,g, or c
  misc_feature (410): n equals a,t,g, or c
  misc_feature (416): n equals a,t,g, or c
  misc_feature (450): n equals a,t,g, or c
  misc_feature (455): n equals a,t,g, or c
  misc_feature (456): n equals a,t,g, or c
gcctctngcgggccctgttcaagcggaatcctgccaaccggctcggctccggccctgatggggcagaggaaatcaagcggcatgtcttctactccaccattgactggaataagctataccgtcgtgagancacgccacccttcaagccagcagtggctcagcctgatgacaccttctactttgacaccgagttcacgtcccgcacacccaaggattccccaggcatcccccccagcgctggggcccatcagctgttccggggcttcagcttcgtggccaccggcctgatggaagacgacggcaagcctcgtgccccgcangcacccctgcactcggtggtacagcaactccatgggaagaacctggtttttagtgacggctacgtggtaaaggagacaattggtgtgggntcctantctgagtgcaagcgctgtgtccacaaagggccanaacannaataatgcaataggggaggtaaca

SEQ ID NO: 464 - DNA, 220 bp, Homo sapiens
  misc_feature (16): n equals a,t,g, or c
  misc_feature (17): n equals a,t,g, or c
  misc_feature (18): n equals a,t,g, or c
  misc_feature (30): n equals a,t,g, or c
  misc_feature (42): n equals a,t,g, or c
  misc_feature (58): n equals a,t,g, or c
  misc_feature (63): n equals a,t,g, or c
  misc_feature (67): n equals a,t,g, or c
  misc_feature (72): n equals a,t,g, or c
  misc_feature (105): n equals a,t,g, or c
  misc_feature (129): n equals a,t,g, or c
  misc_feature (147): n equals a,t,g, or c
  misc_feature (157): n equals a,t,g, or c
  misc_feature (170): n equals a,t,g, or c
  misc_feature (213): n equals a,t,g, or c
agggacacgtcccatnnngtggcgggcgcnctgcggcccttngtgcaggccacggtgnccgcnaccngaagncagcctgttttggacctaaagcggcccttcctnagccgggagtcgctgagcggccangcctgcgatcgacttgtngtcgactccntgggtgctcaatntccctgcttctttttgttaattcccacacagacatcaaggtgnctgattt

SEQ ID NO: 465 - DNA, 438 bp, Homo sapiens
  misc_feature (330): n equals a,t,g, or c
  misc_feature (366): n equals a,t,g, or c
  misc_feature (383): n equals a,t,g, or c
  misc_feature (403): n equals a,t,g, or c
  misc_feature (414): n equals a,t,g, or c
  misc_feature (428): n equals a,t,g, or c
ataggcatgagccaccacgccaggccgggaatgccctattctaattcacataaagactccatgtgggctagcaggcatgtgaaatgtctgccagtgcatcaacagctatataactaagaagttatctttttcactgtcttctggtactcttcatttcacttgggttttttagcaattcaggaagctggaatgtttgaatgggttttagcttgataccttcttctttttcccatttggcagataataccactagtctgacggataaacacctggacccaatcagggaaaatctgggaaagcactgggaaaaactgtgcccgtaaactgggnttcacacagtctcagattgatgaattgaccatgacnatgagcgagatggatgnaagaaaggttaccagatgcnccaaaatgggngatgaggaaggctnaaggggcccg

SEQ ID NO: 466 - DNA, 127 bp, Homo sapiens
  misc_feature (21): n equals a,t,g, or c
  misc_feature (53): n equals a,t,g, or c
  misc_feature (87): n equals a,t,g, or c
  misc_feature (94): n equals a,t,g, or c
  misc_feature (118): n equals a,t,g, or c
  misc_feature (122): n equals a,t,g, or c
gcacgattcatgcaaaaaggnaactaagcactatgagatgcttgctaatcgancagctgcaaatggtcactgcattgatatttatgnttgtgcncctgatcaaactggacttttgganctgnagtgt

SEQ ID NO: 467 - DNA, 439 bp, Homo sapiens
  misc_feature (40): n equals a,t,g, or c
  misc_feature (194): n equals a,t,g, or c
  misc_feature (295): n equals a,t,g, or c
  misc_feature (409): n equals a,t,g, or c
gctggaatctttacaggagaaccacttccaagaagatgancagtttctgggagccgttatgccaaggcttggcattggaatggatacttgtgtcattcctttgaagcacggtgggctttccttggttcaaaccacagattacatttacccgatcgtagacgacccttacatgatgactcctgcagttgctgaantcaggcctgtcccctgcccacacttggcactgggcataaagcaattagggaggaagcaggaaagccctctgctgctgttgcaactgaatacatgctggcangataacatgtgccaatgtcctcagtgactctatgcaatgggggtcacggaatgtgacaatatgctgatgctccttggaatcataataaaatgaccgacaggaaaaggataaatnatcctctgattatccaaggttttaaaacca

SEQ ID NO: 468 - DNA, 484 bp, Homo sapiens
  misc_feature (350): n equals a,t,g, or c
  misc_feature (399): n equals a,t,g, or c
  misc_feature (412): n equals a,t,g, or c
  misc_feature (415): n equals a,t,g, or c
  misc_feature (449): n equals a,t,g, or c
  misc_feature (463): n equals a,t,g, or c
gagcaggcccgttggaagtggttgtgacaaccccagcaatgtggagaagcctggggcttgcctggctctctgtctcctcccatcgggaggaacagagagccaggaccaaagctccttatgtaagcaacccccagctggacataagagatcaagatcaatgctaaactccaatggttcagtgactgtggttgtcttcttcaagccagctgatacctgtcatactgcaggcatctaaattagaaacctgcgagtaaaactgaagaaagaaggatattctaatattcttatattgtgtaatattaaggaatctcttctcgataaaatcacacatctaagaataaggttaaaanatatttctgttataccagaagaaacaacaatgctgactctttaatgaanaaatactctatantanatgggcgctgaatactgttgctttctcacttcangaaaacataatgtntgaaaatggacgtttcattaa

SEQ ID NO: 469 - DNA, 489 bp, Homo sapiens
  misc_feature (308): n equals a,t,g, or c
  misc_feature (348): n equals a,t,g, or c
  misc_feature (368): n equals a,t,g, or c
  misc_feature (371): n equals a,t,g, or c
  misc_feature (387): n equals a,t,g, or c
  misc_feature (417): n equals a,t,g, or c
  misc_feature (420): n equals a,t,g, or c
  misc_feature (458): n equals a,t,g, or c
  misc_feature (468): n equals a,t,g, or c
  misc_feature (477): n equals a,t,g, or c
cgcctggcgattaccggtctcaccatggagcggaaagtgcttgcgctccaggcccgaaagaaaaggaccaaggccaagaaggacaaagcccaaaggaaatctgaaactcagcaccgaggctctgctccccactctgagagtgatctaccagagcaggaagaggagattctgggatctgatgatgatgagcaagaagatcctaatgattattgtaaaggaggttatcatcttgtgaaaattggagatctattcaatgggagataccatgtgatccgaaagttaggctggggacacttttcaacagtatnggttatcatggggtattccagttaagttttaattggttcntgtaaaaagattagttagangangtctaaaagggtttgnctgagttccatggtggacccaggttcaacnacnctagccggtccattaccagaatttgttgttggcaaagncccgatcctnggggaaccntttctttcggaa

SEQ ID NO: 470 - DNA, 318 bp, Homo sapiens
  misc_feature (2): n equals a,t,g, or c
  misc_feature (12): n equals a,t,g, or c
  misc_feature (21): n equals a,t,g, or c
  misc_feature (32): n equals a,t,g, or c
  misc_feature (73): n equals a,t,g, or c
  misc_feature (102): n equals a,t,g, or c
  misc_feature (103): n equals a,t,g, or c
  misc_feature (106): n equals a,t,g, or c
  misc_feature (114): n equals a,t,g, or c
  misc_feature (151): n equals a,t,g, or c
  misc_feature (188): n equals a,t,g, or c
  misc_feature (223): n equals a,t,g, or c
  misc_feature (258): n equals a,t,g, or c
  misc_feature (264): n equals a,t,g, or c
  misc_feature (280): n equals a,t,g, or c
  misc_feature (281): n equals a,t,g, or c
cntcactatatntgaggagcnggtacccctgnaggtaccggtccggaattcccgggtcgacccacgcgtccgntatgacaacctgatcacaccagccatgannggngccggctncctgcaggggaacgtcgattcttgccagggtgacagnggagggcctctggtcacttcgaagaacaatatctggnggctgataggggatacaagctggggttctggctgngccaaagcttacagaccaggagtgtacgggaatgngatggnattcacggactggatnnatcgacaaatgagggcagacggctaatccacatggct

SEQ ID NO: 471 - DNA, 455 bp, Homo sapiens
  misc_feature (306): n equals a,t,g, or c
  misc_feature (417): n equals a,t,g, or c
  misc_feature (426): n equals a,t,g, or c
  misc_feature (431): n equals a,t,g, or c
  misc_feature (440): n equals a,t,g, or c
  misc_feature (446): n equals a,t,g, or c
ggagtatacaccatgagcaaagctcaccctcccgagttgaaaaaatttatggacaagaagttatcattgaaattaaatggtggcagacatgtccaaggaatattgcggggatttgatccctttatgaaccttgtgatagatgaatgtgtggagatggcgactagtggacaacagaacaatattggaatggtggtaatacgaggaaatagtatcatcatgttagaagccttggaacgagtataaataatggctgttcagcaagagaaacccatgtcctctctccatagggcctgttttactatgatnttaaaaattaagtcatgtacattttcatattaaactttttgttaaataaacttttgtaataatcaaaaaaaaaaaaaaaaaaaaaaacccaagggggggcccggtccccantcccccctnttttnattcctttnaaaatnccctggccc

SEQ ID NO: 472 - DNA, 676 bp, Homo sapiens
  misc_feature (605): n equals a,t,g, or c
  misc_feature (669): n equals a,t,g, or c
  misc_feature (672): n equals a,t,g, or c
gctccaggagtgggacggagggagctggccgggatgaagtctgagactatgtcctgagaagaaagagtgtatcgtattggttgaaaagttggtggggtcgggcttaagcggaggagggggctctctggcccttactcggcagatgggcccggagagaggacgggaggtgccgggagaacatcgagggaccggtggaggaagggtagctggatgagttttgattcatcatggataatctgtcatcagaagaaattcaacagagagctcaccagattactgatgagtctctggaaagtacgaggagaatcctgggtttagccattgagtctcaggatgcaggaatcaagaccatcactatgctggatgaacaaaaggaacaactaaaccgcatagaagaaggcttggaccaaataaataaggacatgagagagacagagaagactttaacagaactcaacaaatgctgtggcctttgtgtctgcccatgtaatagaacaaagaactttgagtctggcaaggcttataagacaacatggggagatggtggagaaaactcaccttgcaatgtagtatctaaacagccaggcccggtgacaaatggtcanctttagcaaccaacaacaggagcagccagtggtggatacattaaacccataactaatgatcccnganaaga

SEQ ID NO: 473 - DNA, 512 bp, Homo sapiens
  misc_feature (1): n equals a,t,g, or c
  misc_feature (403): n equals a,t,g, or c
  misc_feature (457): n equals a,t,g, or c
  misc_feature (487): n equals a,t,g, or c
  misc_feature (495): n equals a,t,g, or c
  misc_feature (500): n equals a,t,g, or c
  misc_feature (506): n equals a,t,g, or c
ntcgacagaagggtacggctgcgagaagacgacagaagggtacggctgcgagaagacgacagaagggggcagcatggcgtacccggggcatcctggcgccggcggcgggtactacccaggcgggtatggaggggctcccggagggcctgcgtttcccggacaaactcaggatccgctgtatggttactttgctgctgtagctggacaggatgggcagatagatgctgatgaattgcagagatgtctgacacagtctggcattgctggaggatacaaaccttttaacctggagacttgccggcttatggtttcaatgctggatagagatatgtctggcacaatgggtttcaatgaatttaaagaactctgggctgtactgaatggctggagacaacactttatnaatttttgacactgcaggaatggaacaagtagacccacaagaattggataaagnccctgacaacaatgggatttaaggtttgantccccaanctggngaattnaattgc

SEQ ID NO: 474 - DNA, 272 bp, Homo sapiens
  misc_feature (18): n equals a,t,g, or c
  misc_feature (59): n equals a,t,g, or c
  misc_feature (69): n equals a,t,g, or c
  misc_feature (74): n equals a,t,g, or c
  misc_feature (104): n equals a,t,g, or c
  misc_feature (122): n equals a,t,g, or c
  misc_feature (129): n equals a,t,g, or c
  misc_feature (150): n equals a,t,g, or c
  misc_feature (185): n equals a,t,g, or c
  misc_feature (186): n equals a,t,g, or c
  misc_feature (191): n equals a,t,g, or c
  misc_feature (234): n equals a,t,g, or c
  misc_feature (249): n equals a,t,g, or c
ggcacagcggcgggcccngtcgtccggcggttgcggatgtcgggctgggcggacgagcncggcgtcganggccnacgggcgcatctacgtggggaacttccgancgacgtgcgcgagaaggnacttggnaggacctgttctacaagtacngccgcatccgcgagatcgagctcaagaaccggcanncctcntcctgtcggccttcgtgcgcttcgaggaacccccgagatgcanaggatgctatttatnggaagaaatggttatgattatgg

SEQ ID NO: 475 - DNA, 338 bp, Homo sapiens
  misc_feature (1): n equals a,t,g, or c
  misc_feature (8): n equals a,t,g, or c
  misc_feature (15): n equals a,t,g, or c
  misc_feature (16): n equals a,t,g, or c
  misc_feature (36): n equals a,t,g, or c
  misc_feature (119): n equals a,t,g, or c
  misc_feature (127): n equals a,t,g, or c
  misc_feature (170): n equals a,t,g, or c
  misc_feature (173): n equals a,t,g, or c
  misc_feature (204): n equals a,t,g, or c
  misc_feature (250): n equals a,t,g, or c
  misc_feature (284): n equals a,t,g, or c
  misc_feature (298): n equals a,t,g, or c
  misc_feature (308): n equals a,t,g, or c
  misc_feature (318): n equals a,t,g, or c
naatctcngtttggnnggcccgcccgcaggtccggnccggaactcccgggtcgacccacgcgtccggctaccattctgaaacaaatgcaagtattacatccagcagccagaatgctggnggagctgnctaaggctcaagatatagaagcaggagatggcaccacatcagnagncatcattgctggctccctcttagattcttgnaccaagcttcttcagaaagggattcatccaaccatcatttctgagncattccagaaggccctggaaaagggcattgaaancttgactgacatgnctcgacctgnggaactgagngacagagaaactttggtaaa

SEQ ID NO: 476 - DNA, 424 bp, Homo sapiens
  misc_feature (330): n equals a,t,g, or c
  misc_feature (378): n equals a,t,g, or c
  misc_feature (381): n equals a,t,g, or c
  misc_feature (388): n equals a,t,g, or c
  misc_feature (424): n equals a,t,g, or c
ttaagttcatgaattccagagttttcaagaaaattcaagctttgaaggcttcaccgtctaagaaacggtgcaattcaatcgccgccctaaaggccacttcacaggagattgtgtcctcaattagccaggaatggaaggatgagaagcgggatttgctgactgaaggacaaagttttagcagccttgatgaagaagccctgggatcccgacacaggccagacctggtccctagcactccatcactgtttgaagctgcttccttggcaaccacaatttcacttcttcctatacgtcaatgggcattatccacaagacaaggcctacaatttnttcaaaccaggtaatattttggtgcaattcaaattaacccttcaaggnttnttaaccncaatcaaccattagggcctgaacccgttttttttgn

SEQ ID NO: 477 - DNA, 228 bp, Homo sapiens
  misc_feature (6): n equals a,t,g, or c
  misc_feature (71): n equals a,t,g, or c
  misc_feature (110): n equals a,t,g, or c
  misc_feature (111): n equals a,t,g, or c
  misc_feature (153): n equals a,t,g, or c
  misc_feature (157): n equals a,t,g, or c
  misc_feature (165): n equals a,t,g, or c
  misc_feature (207): n equals a,t,g, or c
  misc_feature (223): n equals a,t,g, or c
ggcatncatgtcttcagaaacatccataagaccaatctctgtgatcttatcaccagccttttgtgcctttnggttcttttgccaaccaaagaactcaatgaacacttctnntccaagcttaaggcaccgattcctattgaacttgttgttgtngtancagccacnttaacctctcattttggaaaactacatgaaaattataattcnagtattgctggacatnttccc

SEQ ID NO: 478 - DNA, 486 bp, Homo sapiens
aactagtctcgaacggccccgcggacacgctggatctgacctactggattgacggcacccggcatgtggtctccctggaggacgtcggcctggctgactcgcagtggaagaacgtcaccgtgcaggtggctggcgagacctacagcttgcacgtgggctgcgacctcatagacagcttcgctctggacgagcccttctacgagcacctgcaggcggaaaagagccggatgtacgtggccaaaggctctgccagagagagtcacttcaggggtttgcttcagaacgtccacctagtgtttgaaaactctgtggaagatattctaagcaagaagggttgccagcaaggccagggaggtaggtgtgttgtgaaaaatgcattttatatactggcttggatggatttctattgtgacatggtgtatgtgtgtgtgtgtatgtgtgtgcattcatgcttgtaaaaatttaagtaaaaatatttgggtaact

SEQ ID NO: 479 - DNA, 524 bp, Homo sapiens
  misc_feature (70): n equals a,t,g, or c
  misc_feature (369): n equals a,t,g, or c
  misc_feature (409): n equals a,t,g, or c
  misc_feature (432): n equals a,t,g, or c
  misc_feature (471): n equals a,t,g, or c
ggtgcctgctgcctcaaaccaccttgtgtaaaatctgcaatacggcttcttccatgtacctgtgcctganctgtctgcaataaagaagaatttgtaaaaaaacggcacctcgctttgcttttcctccgcaaccatgtctgacaaacccgatatggctgagatcgagaaattcgataagtcgaaactgaagaagacagagacgcaagagaaaaatccactgccttccaaagaaacgattgaacaggagaagcaagcaggcgaatcgtaatgaggcgtgcgccgccaatatgcactgtacattccacaagcattgccttcttattttacttcttttagctgtttaactttgtaagatgcaaagaggttggntcaagtttaaatgactgtgctgcccctttcacatcaaagnactactgacaacgaaggccgcgnctgcctttcccatctgtctatctatctggctggcagggnaggaaagaacttgcatgttggtgaaggaagaagtggggtggaagaagtggggt

SEQ ID NO: 480 - DNA, 306 bp, Homo sapiens
  misc_feature (15): n equals a,t,g, or c
  misc_feature (19): n equals a,t,g, or c
  misc_feature (34): n equals a,t,g, or c
  misc_feature (52): n equals a,t,g, or c
  misc_feature (64): n equals a,t,g, or c
  misc_feature (66): n equals a,t,g, or c
  misc_feature (76): n equals a,t,g, or c
  misc_feature (97): n equals a,t,g, or c
  misc_feature (126): n equals a,t,g, or c
  misc_feature (129): n equals a,t,g, or c
  misc_feature (130): n equals a,t,g, or c
  misc_feature (133): n equals a,t,g, or c
  misc_feature (134): n equals a,t,g, or c
  misc_feature (145): n equals a,t,g, or c
  misc_feature (146): n equals a,t,g, or c
  misc_feature (161): n equals a,t,g, or c
  misc_feature (166): n equals a,t,g, or c
  misc_feature (181): n equals a,t,g, or c
  misc_feature (186): n equals a,t,g, or c
  misc_feature (194): n equals a,t,g, or c
  misc_feature (200): n equals a,t,g, or c
  misc_feature (233): n equals a,t,g, or c
  misc_feature (253): n equals a,t,g, or c
  misc_feature (267): n equals a,t,g, or c
  misc_feature (275): n equals a,t,g, or c
  misc_feature (304): n equals a,t,g, or c
ggcagagggcccgcnagcngccgccctcctcctnagcctgctgctgttcggnttcaccctagtntnaggcacaggngcagagaagactggcgtgtgncccgagctccaggctgcaccagcaactgncanncannagtgcgtcctnnggaacagcgaaatgncccgnacaacctccaagtgnctgcnaggcgggnctgtgncaccttctgcctctctgccccaatgatgaaggngggttcctgcccccaggtgnaacattaaactttncccaggtngggcctctgttcgggcaccatgccaggtngt

SEQ ID NO: 481 - DNA, 473 bp, Homo sapiens
  misc_feature (364): n equals a,t,g, or c
  misc_feature (411): n equals a,t,g, or c
  misc_feature (418): n equals a,t,g, or c
  misc_feature (431): n equals a,t,g, or c
  misc_feature (445): n equals a,t,g, or c
  misc_feature (459): n equals a,t,g, or c
gcctttagctgccatcttgcgtccccgcgtgtgtgcgcctaatctcaggtggtccacccgagaccccttgagcaccaaccctagtcccccgcgcggccccttattcgctccgacaagatgaaagaaacaatcatgaaccaggaaaaactcgccaaactgcaggcacaagtgcgcattggtgggaaaggaactgctcgcagaaagaagaaggtggttcatagaacagccacagcagatgacaaaaaacttcagttctccttaaagaagttaggggtaaacaatatctctggtattgaagaggtgaatatgtttacaaaccaaggaacagtgatccactttaacaaccctaaagttcaggcatctntggcagcgaacactttcaccattacaggccatgctgagacaaagcanctgacanaaatgctacccancatcttaaaccagnttggtgcggatagnctgactaagtttaa

SEQ ID NO: 482 - DNA, 571 bp, Homo sapiens
  misc_feature (3): n equals a,t,g, or c
  misc_feature (4): n equals a,t,g, or c
  misc_feature (13): n equals a,t,g, or c
  misc_feature (70): n equals a,t,g, or c
  misc_feature (92): n equals a,t,g, or c
  misc_feature (297): n equals a,t,g, or c
  misc_feature (307): n equals a,t,g, or c
  misc_feature (494): n equals a,t,g, or c
  misc_feature (550): n equals a,t,g, or c
  misc_feature (565): n equals a,t,g, or c
  misc_feature (569): n equals a,t,g, or c
  misc_feature (571): n equals a,t,g, or c
gannacttctctngaaacgcccgtaccggtcttgaattcccggctcgacccacgcgtccggatgacggtnccgggcgcctctcccgaggacncttgggtcaaggtggagtatgcctacagcgacaacagcctggaccccgggctttttgtagaaagcacccgcaaggggagtgtagtgtccagagctaatagcatcggttccaccagtgcctcttctgtccccaacacagatgatgaggacagtgattaccaccaggaggcctacaaggagtcctacaaagaccggcggcggcgcgnaacacacttnaggcttgagcagaagaggagggacgccatcaagagaggctatgatgaccttcagaccatcgtccccacttgccagcagcaggacttctccattggctcccaaaagctcagcaaagccatcgtctacaaaagaccattgactacattcagtttttgcacaaggagaagaaaaagcaggaggaggaggngtcacgttacgcaaggatgtaccggcctaaagatcatgaaagtgaactatgagcanattgtgaaggcacantagnan

SEQ ID NO: 483 - DNA, 220 bp, Homo sapiens
  misc_feature (16): n equals a,t,g, or c
  misc_feature (69): n equals a,t,g, or c
  misc_feature (71): n equals a,t,g, or c
  misc_feature (99): n equals a,t,g, or c
  misc_feature (136): n equals a,t,g, or c
  misc_feature (179): n equals a,t,g, or c
  misc_feature (183): n equals a,t,g, or c
  misc_feature (185): n equals a,t,g, or c
  misc_feature (215): n equals a,t,g, or c
aatacaacgggaatcnctaactgccttgcgtgaaggtcccggtccggaattcccgggtcgacccacgcntncgggccaggatgctgaatctgctgctgntggcgctggccgtcctggcgagccgcgcctacgcggnccctgccccaggccaggccctgcagcgagtgggcatcgtcggnggtnangaggcccccaggagcaagtggccctggcangtgag

SEQ ID NO: 484 - DNA, 439 bp, Homo sapiens
  misc_feature (5): n equals a,t,g, or c
  misc_feature (18): n equals a,t,g, or c
  misc_feature (31): n equals a,t,g, or c
  misc_feature (35): n equals a,t,g, or c
  misc_feature (36): n equals a,t,g, or c
  misc_feature (394): n equals a,t,g, or c
  misc_feature (406): n equals a,t,g, or c
  misc_feature (414): n equals a,t,g, or c
  misc_feature (434): n equals a,t,g, or c
gggangggaggggaaatncttctcggtatcnggtnnctggagctccaccgcggtggcggccgctctagaactagtggatcccccgggctgcaggaattcggcacgagcagcccagcagcggctgaccctctgcctgcggggaagggagtcgccaggcggccgtcatggcggtgtcggagagccagctcaagaaaatggtgtccaagtttttaacgatggcagttccagggaactaatgaacctcactggaacaatccctgtgccttatagaggtaatacatacaatattccaatatgcctatggctactggacacatacccatataatccccctatctgttttgttaagcctactagttcaatgactattaaaacaggaaagcatgttgattgnccaaaaaaattngggggggnaaaaaaggggaaaattttanttttt

SEQ ID NO: 485 - DNA, 115 bp, Homo sapiens
  misc_feature (11): n equals a,t,g, or c
  misc_feature (69): n equals a,t,g, or c
  misc_feature (71): n equals a,t,g, or c
  misc_feature (87): n equals a,t,g, or c
  misc_feature (89): n equals a,t,g, or c
  misc_feature (104): n equals a,t,g, or c
gacaaagtaangcatccctcctgaccatcagacgttgatctttgctgggaaacatctggaaaatggacncnccctgtctgactacancntccacaaagaatccnccctgcacctg

SEQ ID NO: 486 - DNA, 558 bp, Homo sapiens
  misc_feature (1): n equals a,t,g, or c
  misc_feature (8): n equals a,t,g, or c
  misc_feature (12): n equals a,t,g, or c
  misc_feature (151): n equals a,t,g, or c
  misc_feature (159): n equals a,t,g, or c
  misc_feature (255): n equals a,t,g, or c
  misc_feature (270): n equals a,t,g, or c
  misc_feature (353): n equals a,t,g, or c
  misc_feature (402): n equals a,t,g, or c
  misc_feature (404): n equals a,t,g, or c
  misc_feature (410): n equals a,t,g, or c
  misc_feature (416): n equals a,t,g, or c
  misc_feature (469): n equals a,t,g, or c
  misc_feature (488): n equals a,t,g, or c
  misc_feature (495): n equals a,t,g, or c
  misc_feature (517): n equals a,t,g, or c
  misc_feature (539): n equals a,t,g, or c
ntctctgnggtntagctgaacgccgaggaccggccgaattcccggtcgaccccgcgttcgttcttttagcatcaaggaatctgatgagaaagcaggaaagatcttttcacagatgaacaatattatgagtaaaagtttgcatgatgatggntttactgntccacagattattgaaatggagctggatagtcaggagcaagttgttgttgcaggatcctcctgtgacttacattcagcaatttgcagatgcagcanccaaccttacctctncggattctgagaagtggaactctgtgtttcccaagcctgggactttggttcaagtgcttgaggctgcaaagtttgcataggangagaatctttgtataactcaataactccttgtgctgacggaattcattngntggtangactgnggacatgccctgttgaatccttgagtgcaataaatcaaagtagaaggccttgnataatttaaattaaattanactctgnactatgtaataaccggaaaggnaactgcaatcaaatttgcttgnatggaatggggcaaaatta

SEQ ID NO: 487 - DNA, 354 bp, Homo sapiens
  misc_feature (13): n equals a,t,g, or c
  misc_feature (15): n equals a,t,g, or c
  misc_feature (18): n equals a,t,g, or c
  misc_feature (21): n equals a,t,g, or c
  misc_feature (79): n equals a,t,g, or c
  misc_feature (114): n equals a,t,g, or c
  misc_feature (115): n equals a,t,g, or c
  misc_feature (120): n equals a,t,g, or c
  misc_feature (127): n equals a,t,g, or c
  misc_feature (155): n equals a,t,g, or c
  misc_feature (195): n equals a,t,g, or c
  misc_feature (203): n equals a,t,g, or c
  misc_feature (229): n equals a,t,g, or c
  misc_feature (239): n equals a,t,g, or c
  misc_feature (307): n equals a,t,g, or c
  misc_feature (315): n equals a,t,g, or c
  misc_feature (339): n equals a,t,g, or c
  misc_feature (343): n equals a,t,g, or c
  misc_feature (346): n equals a,t,g, or c
gctctgctcaacngnganggntcggcacaacattcagaaggaattatgtcttcatgctgctcaaggtctcgctcagctnaaggcatgtacctacaaaggtcacaagacaggtgnnactgnagagcanatatgggagatccagaaggatcaacttntatactatccattcttaaaaatgtgcctttcagcaaatgntgagcatncaagcttagtggatgcaacccatcanaaccactccnaaaatggatacttagccaaaatgattaagcgttccttaaaattaacttgaccaaggaaatatcctttntcataaanctgtgactaggcatacactgtagntgtnganaattatgc

SEQ ID NO: 488 - DNA, 508 bp, Homo sapiens
  misc_feature (134): n equals a,t,g, or c
  misc_feature (236): n equals a,t,g, or c
  misc_feature (242): n equals a,t,g, or c
  misc_feature (258): n equals a,t,g, or c
  misc_feature (275): n equals a,t,g, or c
  misc_feature (288): n equals a,t,g, or c
  misc_feature (298): n equals a,t,g, or c
  misc_feature (300): n equals a,t,g, or c
  misc_feature (314): n equals a,t,g, or c
  misc_feature (349): n equals a,t,g, or c
  misc_feature (351): n equals a,t,g, or c
  misc_feature (375): n equals a,t,g, or c
  misc_feature (387): n equals a,t,g, or c
  misc_feature (400): n equals a,t,g, or c
  misc_feature (407): n equals a,t,g, or c
  misc_feature (412): n equals a,t,g, or c
  misc_feature (413): n equals a,t,g, or c
  misc_feature (424): n equals a,t,g, or c
  misc_feature (429): n equals a,t,g, or c
  misc_feature (434): n equals a,t,g, or c
  misc_feature (440): n equals a,t,g, or c
  misc_feature (441): n equals a,t,g, or c
  misc_feature (450): n equals a,t,g, or c
  misc_feature (456): n equals a,t,g, or c
  misc_feature (458): n equals a,t,g, or c
  misc_feature (462): n equals a,t,g, or c
  misc_feature (469): n equals a,t,g, or c
  misc_feature (475): n equals a,t,g, or c
  misc_feature (478): n equals a,t,g, or c
  misc_feature (485): n equals a,t,g, or c
  misc_feature (493): n equals a,t,g, or c
aattcggcacgagaaagcgcatggagactaagggagctggagtgaccctgaatgttctggaaatgacttctgaagatttagaaaatgctctaaaagcagtcatcaatgacaaaagttacaaggagaacatcatncgcctctccagccttcacaaggaccgcccggtggagccgctggacctggccgtgttctgggtggagtttgtgatgaggcacaagggcgcgccacacctgcgncccgcnccccacggacctcacntggtaccagtaccattnccttggccgtganttggtttccntnttggcccttggtcntgaaattggccttaataacctttaaaattttgctntnatggttacccgaaaattttggggnaaaaaagggccntttaagaaagccncaaaatnagacnnccttttgaaangggtnggganaaaggnnaaaattttnaccttncncggnatttccnaatttnaanagatagngtttaaanatttttttttttagg

SEQ ID NO: 489 - DNA, 425 bp, Homo sapiens
  misc_feature (3): n equals a,t,g, or c
ccncggtgggatgttgagctgaggccggaggagaagtagcagtcgctggcagagcacacaggctgctctgggggatgagctggtgcgtttaaggaacaggccagcactggcattcgcaagcagtggggaaggggagagatgccgaggtggtcagtatcctgactttcagaggcctttttttgtttgttttaatttttgctagattgatattaaaaactcatgtggaggaactcaaggaatgtttagaagaccaaaagtccccaatgacaggaacaaaagcaaccaatttttaactttctcttctcattcctgttttcattgatttcccacatgtagtccttttgctcaggaagtctttggggaaattaaggatctttgaagctctgaaataggtgatcaggttagtggtgtctgtcagctgtctg

SEQ ID NO: 490 - DNA, 607 bp, Homo sapiens
  misc_feature (2): n equals a,t,g, or c
  misc_feature (5): n equals a,t,g, or c
  misc_feature (6): n equals a,t,g, or c
  misc_feature (8): n equals a,t,g, or c
  misc_feature (9): n equals a,t,g, or c
  misc_feature (58): n equals a,t,g, or c
  misc_feature (443): n equals a,t,g, or c
ancanncnnacaccacctcactaaagggaacaaaagctggagctccaccgcggtgcgnccgctctagaactagtggatcccccgggctgcaggaattcggcacgagaagccgtcaaggagtagaaattggtatgcttagaagcagattctaaaagcagtttctcttcagaacatcttttttcataccacttgataagcatcttgaaacaccatggctgtagctgcagtaaaatgggtgatgtcaaagagaactatcttgaaacatttatttccagtccaaaatggagctttatattgtgtttgtcataaatctacgtattctcctctaccagatgactataattgcaacgtagagcttgctctgacttctgatggcaggacaatagtatgctaccacccttctgtggacattccatatgaacacacaaaacctatccctcggncagatcctgtgcataataatgaagaaacacatgatcaagtgctgaaaaccagattggaagaaaaagttgaacaccttgaggaaggacctatgatagaacaacttagcaaaatgtttctttactactaagcaccgttggtatcctcatggacggtatcacagatg

SEQ ID NO: 491 - DNA, 371 bp, Homo sapiens
  misc_feature (81): n equals a,t,g, or c
  misc_feature (265): n equals a,t,g, or c
  misc_feature (336): n equals a,t,g, or c
  misc_feature (339): n equals a,t,g, or c
  misc_feature (353): n equals a,t,g, or c
  misc_feature (364): n equals a,t,g, or c
  misc_feature (368): n equals a,t,g, or c
aaactgtaattgcaatgttgaggggtgacttgctaaccagtcagttgaattccaggcacagattgagttgcttctggagtnggcagggtcactgtgaacgcctacgtgagcctcttctacaccataaagcgggcacaagtggtcagtcctgaaagagtcggaagctggcatatcggccgcccaagtgaccctgtccagtgtctgcttgccatcctgccagaacaggccctcaagcccaagagccatcccaggcctgtttcagctncagctaaagcctctctttcatctggaagaagaggcaagggggcaggagaccaggctctagctctggggccntcnttcagcccccatcnggggaataaanttanttt

SEQ ID NO: 492 - DNA, 440 bp, Homo sapiens
  misc_feature (347): n equals a,t,g, or c
  misc_feature (353): n equals a,t,g, or c
  misc_feature (397): n equals a,t,g, or c
  misc_feature (402): n equals a,t,g, or c
  misc_feature (434): n equals a,t,g, or c
ttgagtcgtgttaatgtaagaatgactcctatcattaggagtgctgctcggaggttactcacctttgggagtaatactgaagagaggggtctgcagaaaggatgtgtatgaagcttagataataatggctgtttcgtaaactgtttgagacctattaatgaaaatgactatttcttgctgtttttatccaacgtctgcattttccccctttaaagctgcggtctcctgtttgataaaagaatattggccagtattgcagattttaactggatttggctgatcctccaggggaccagtttctgtgggcgtgtattggagcaggtttgtctttaactcttaaatggttnggtccnaatttttaaaaaggaagggccccaagtagcccagatttaaaggngtatncccattcccaaagttccttggaacaattaccnaaagga

SEQ ID NO: 493 - DNA, 90 bp, Homo sapiens
  misc_feature (1): n equals a,t,g, or c
  misc_feature (20): n equals a,t,g, or c
  misc_feature (27): n equals a,t,g, or c
  misc_feature (49): n equals a,t,g, or c
  misc_feature (56): n equals a,t,g, or c
ngggagctggcctggagcgnatgggcnccgtgatggatcgcatggccancggctgncagcgcatgggcccatcaatctggagcggatcgg

SEQ ID NO: 494 - DNA, 218 bp, Homo sapiens
  misc_feature (28): n equals a,t,g, or c
  misc_feature (30): n equals a,t,g, or c
  misc_feature (40): n equals a,t,g, or c
  misc_feature (46): n equals a,t,g, or c
  misc_feature (47): n equals a,t,g, or c
  misc_feature (53): n equals a,t,g, or c
  misc_feature (78): n equals a,t,g, or c
  misc_feature (87): n equals a,t,g, or c
  misc_feature (95): n equals a,t,g, or c
  misc_feature (135): n equals a,t,g, or c
  misc_feature (163): n equals a,t,g, or c
  misc_feature (167): n equals a,t,g, or c
  misc_feature (192): n equals a,t,g, or c
  misc_feature (216): n equals a,t,g, or c
gggtcgacccacgcggtccgtttttttntntttttttagntcccannttttantcaagaactcatacaaaattttccngataaatgnaatttaancctcgtcttcctcctcttcttcgtcctggttaatctgggnagtaacgtaattcgtaactctctttggntgtnagcaactgacgcgcaaccagttcangtagattattcttcttcaaatatngt

SEQ ID NO: 495 - DNA, 148 bp, Homo sapiens
  misc_feature (26): n equals a,t,g, or c
  misc_feature (83): n equals a,t,g, or c
  misc_feature (96): n equals a,t,g, or c
  misc_feature (111): n equals a,t,g, or c
  misc_feature (116): n equals a,t,g, or c
  misc_feature (122): n equals a,t,g, or c
gtttttaaaaaaaacatgtcatgtangttgtctaaaaataaaatgcatttaaactcaaaaaaaaaaaaaaaaaaaaaaaaaanagggggggggcgngggaaaaaaaaaaangaggntgaggntttgaagaagggaaggggggcccccc

SEQ ID NO: 496 - DNA, 536 bp, Homo sapiens
  misc_feature (355): n equals a,t,g, or c
  misc_feature (382): n equals a,t,g, or c
  misc_feature (412): n equals a,t,g, or c
  misc_feature (444): n equals a,t,g, or c
  misc_feature (460): n equals a,t,g, or c
  misc_feature (484): n equals a,t,g, or c
  misc_feature (534): n equals a,t,g, or c
atgacccacactgccagaagagaattcagtattttttacttttcacactgtcttcccgatgagggaaggagcccagccagaaagcactacaatcatggtcaagttcccaactgagtcatcttgtgagtggataatcaggaaaaatgaggaatccaaaagacaaaaatcaaagaacagatggggtctgtgactggatcttctatcattccaattctaaatccgacttgaatattcctggacttacaaaatgccaagggggtgactggaagttgtgggatatcagggtataaattatatccgtgagttgggggagggaagaccagaattcccttggaattgtgtattgatgccattntaagcctaaaagatcaccttgtattcnctttaccttctaaaagccattatttatggngttagaagaagaggaagaaattcaggtaccgnaaaacacttttgttcnggggggggcccgtacccaattcgncccatagtgagtcgtattacaatcacgggccgtcgtttacacggcggacngg

SEQ ID NO: 497 - DNA, 93 bp, Homo sapiens
  misc_feature (84): n equals a,t,g, or c
  misc_feature (85): n equals a,t,g, or c
  misc_feature (88): n equals a,t,g, or c
  misc_feature (89): n equals a,t,g, or c
  misc_feature (91): n equals a,t,g, or c
gtgaaacatcaataaagaccacttaatgcacgctttcaaaaaaaaaaaaaaaaaaaaaaaaaaaaaaaaaaaaaaaaaaaaaannaannanat

SEQ ID NO: 498 - DNA, 392 bp, Homo sapiens
  misc_feature (8): n equals a,t,g, or c
  misc_feature (50): n equals a,t,g, or c
  misc_feature (104): n equals a,t,g, or c
  misc_feature (106): n equals a,t,g, or c
  misc_feature (113): n equals a,t,g, or c
  misc_feature (160): n equals a,t,g, or c
  misc_feature (180): n equals a,t,g, or c
  misc_feature (181): n equals a,t,g, or c
  misc_feature (245): n equals a,t,g, or c
  misc_feature (248): n equals a,t,g, or c
  misc_feature (334): n equals a,t,g, or c
  misc_feature (351): n equals a,t,g, or c
  misc_feature (363): n equals a,t,g, or c
  misc_feature (377): n equals a,t,g, or c
  misc_feature (390): n equals a,t,g, or c
cgggaccnaaggaggagctgcgtggcggcggtggcgacatggcggacctnccgaggcgggtgacgcgccccctgatgatgggcctccaggggagctcgggcctnanggcctgnacggtccagaggaaaagggccgggatcgtgaccgggagcgacggcgnacaccggagcgagcgcgagnncgccgggaccgggatcgtgaccgtgaccgtgaccgcgagcacaaacggggggagcggggcattnaancggggcagggatgaagcccgaagttgggggcggtggccaggacaacgggttggaaggtttgggcaacgacagccgagaattttacntgaattttaaggcggcnacgttacttgtnccggaaattggttntttattgaagttncc

SEQ ID NO: 499 - DNA, 262 bp, Homo sapiens
  misc_feature (23): n equals a,t,g, or c
  misc_feature (40): n equals a,t,g, or c
  misc_feature (60): n equals a,t,g, or c
  misc_feature (76): n equals a,t,g, or c
  misc_feature (78): n equals a,t,g, or c
  misc_feature (104): n equals a,t,g, or c
  misc_feature (114): n equals a,t,g, or c
  misc_feature (160): n equals a,t,g, or c
  misc_feature (209): n equals a,t,g, or c
  misc_feature (212): n equals a,t,g, or c
  misc_feature (218): n equals a,t,g, or c
  misc_feature (219): n equals a,t,g, or c
  misc_feature (226): n equals a,t,g, or c
ggtaagagcaacgtgctttgggngcagagaagagggaganagcagcatcttgcctggatnagccaggggacacagnanagaagcccacctggacacaacaccanaaaggcttcntattcgggtgtggagtcttttcagcaacccggtccagtactgggcngatacagccatccaccttacagatgtgtctacgtgacgctctgccattncanctcggnnactatangtaattctcaagaaagccctcatttttataacctgg

SEQ ID NO: 500 - DNA, 437 bp, Homo sapiens
  misc_feature (309): n equals a,t,g, or c
  misc_feature (317): n equals a,t,g, or c
  misc_feature (384): n equals a,t,g, or c
  misc_feature (398): n equals a,t,g, or c
  misc_feature (405): n equals a,t,g, or c
  misc_feature (406): n equals a,t,g, or c
  misc_feature (418): n equals a,t,g, or c
accacaaagcccccctggagcatcttcccggctggcaggaccatgccatctctgtggagaaggtgctggggagggaagtccttccagtgccacatggagtgaggccctgcccatgctggggactttggggaggaatttggtattctggtggccttgctcagctctcattgagatcttttcctatcagaatgttagtgaatatacttcgcagctctttgttcagcaataaggaatattctttcaattcctgctcttcaagccaatttactacacccatttgtctttccaaaattcatcccaacggtatanttggtttnggtcctccttggattcaatctgtttcctggtaaaattgaacctgtccattgtgaatcctcttaattncctcctcccaaaanaaccagnncttgtaaatttntggccaactccaggggcca

SEQ ID NO: 501 - DNA, 180 bp, Homo sapiens
  misc_feature (162): n equals a,t,g, or c
  misc_feature (165): n equals a,t,g, or c
  misc_feature (166): n equals a,t,g, or c
  misc_feature (174): n equals a,t,g, or c
  misc_feature (177): n equals a,t,g, or c
gagaactagtctcgagtttttttttttttttttttttgttttttggctctttcaaaggtaatggcccatcgatgagcatttttaacatactccatagtcttttcctgtggtgttaggtctttatttttatttttttcctgggggctgggtgggtttgggggncanngggggaantgncct

SEQ ID NO: 502 - DNA, 436 bp, Homo sapiens
  misc_feature (101): n equals a,t,g, or c
  misc_feature (174): n equals a,t,g, or c
  misc_feature (197): n equals a,t,g, or c
  misc_feature (199): n equals a,t,g, or c
  misc_feature (222): n equals a,t,g, or c
  misc_feature (225): n equals a,t,g, or c
  misc_feature (229): n equals a,t,g, or c
  misc_feature (262): n equals a,t,g, or c
  misc_feature (266): n equals a,t,g, or c
  misc_feature (276): n equals a,t,g, or c
  misc_feature (287): n equals a,t,g, or c
  misc_feature (290): n equals a,t,g, or c
  misc_feature (297): n equals a,t,g, or c
  misc_feature (327): n equals a,t,g, or c
  misc_feature (328): n equals a,t,g, or c
  misc_feature (330): n equals a,t,g, or c
  misc_feature (336): n equals a,t,g, or c
  misc_feature (343): n equals a,t,g, or c
  misc_feature (364): n equals a,t,g, or c
  misc_feature (385): n equals a,t,g, or c
  misc_feature (390): n equals a,t,g, or c
  misc_feature (436): n equals a,t,g, or c
tacaaactgtcctttattcagagtgagactgcggaacattaataatttatcacgcggggagtccccagaagccctgtgcccacgaacccctgtgggcgganggagagaagcggggactccgggagcttcctgagagggccgtgtcttgggagcaaggtgacatatccagtccangcacgcggaacatgactcagaantngggaaacaaaaaaccatcccccnccngaanggggggggccaggcccctaaaaagcacaatggnggcnggtggaattngggttaaaatntcngggttcnaaaaagaccatatttttttttcccagttcnntngccccnccttttnttgttaagggggggggttaanattcccccctccccgggaaanaaaantacctttcttaggaagaagggcccccccccccttcccgcctttttn

SEQ ID NO: 503 - DNA, 418 bp, Homo sapiens
  misc_feature (41): n equals a,t,g, or c
  misc_feature (50): n equals a,t,g, or c
  misc_feature (55): n equals a,t,g, or c
  misc_feature (56): n equals a,t,g, or c
  misc_feature (57): n equals a,t,g, or c
  misc_feature (61): n equals a,t,g, or c
  misc_feature (62): n equals a,t,g, or c
  misc_feature (72): n equals a,t,g, or c
  misc_feature (94): n equals a,t,g, or c
  misc_feature (97): n equals a,t,g, or c
  misc_feature (106): n equals a,t,g, or c
  misc_feature (109): n equals a,t,g, or c
  misc_feature (110): n equals a,t,g, or c
  misc_feature (111): n equals a,t,g, or c
  misc_feature (112): n equals a,t,g, or c
  misc_feature (116): n equals a,t,g, or c
  misc_feature (125): n equals a,t,g, or c
  misc_feature (126): n equals a,t,g, or c
  misc_feature (127): n equals a,t,g, or c
  misc_feature (130): n equals a,t,g, or c
  misc_feature (179): n equals a,t,g, or c
  misc_feature (210): n equals a,t,g, or c
  misc_feature (212): n equals a,t,g, or c
  misc_feature (221): n equals a,t,g, or c
  misc_feature (226): n equals a,t,g, or c
  misc_feature (237): n equals a,t,g, or c
  misc_feature (239): n equals a,t,g, or c
  misc_feature (245): n equals a,t,g, or c
  misc_feature (253): n equals a,t,g, or c
  misc_feature (256): n equals a,t,g, or c
  misc_feature (257): n equals a,t,g, or c
  misc_feature (289): n equals a,t,g, or c
  misc_feature (337): n equals a,t,g, or c
  misc_feature (350): n equals a,t,g, or c
  misc_feature (351): n equals a,t,g, or c
  misc_feature (367): n equals a,t,g, or c
  misc_feature (375): n equals a,t,g, or c
  misc_feature (379): n equals a,t,g, or c
  misc_feature (404): n equals a,t,g, or c
gctcttttaaataaatgagcaagtgtcctaagctatgtcanccaaagatngtccnnnccannctcaaatccngtgactgggatcactcaacagnacngtgatgtangannnncaangaggtgccnnnctnaactgaccaaatgctgccttgtttggcccctaaatcaataaaatatgtnaaaatttgtatcccctgttgtggcatttttntnagataatcnaagcnagaaaaatgananggaatnctggaccnggnngggaaggaaaagaaccctttcttgtcgctggnaactgtgttggtaaggaagtccaaatttgtgcatatgaaataagccgnaaccgctggaacnncactcctatgcagctnctcttganccanaaacaaggagcttggtctaatgganatacactgtgcttg

SEQ ID NO: 504 - DNA, 202 bp, Homo sapiens
  misc_feature (99): n equals a,t,g, or c
  misc_feature (126): n equals a,t,g, or c
  misc_feature (143): n equals a,t,g, or c
  misc_feature (161): n equals a,t,g, or c
  misc_feature (182): n equals a,t,g, or c
  misc_feature (183): n equals a,t,g, or c
gctgggtttataccgtcgtgagacaagttagttttaccctactgatgatgtgttgttgccatggtaatcctgctcagtacgagaggaaccgcaggttcngacatttggtgtatgtgcttggctgangaaccaatggggcgaanctaccatctgtgggattntgactgaacgcctctaattcnnaatcccgcccatgcggaac

SEQ ID NO: 505 - DNA, 568 bp, Homo sapiens
  misc_feature (258): n equals a,t,g, or c
  misc_feature (334): n equals a,t,g, or c
  misc_feature (342): n equals a,t,g, or c
  misc_feature (393): n equals a,t,g, or c
  misc_feature (395): n equals a,t,g, or c
  misc_feature (404): n equals a,t,g, or c
  misc_feature (422): n equals a,t,g, or c
  misc_feature (423): n equals a,t,g, or c
  misc_feature (425): n equals a,t,g, or c
  misc_feature (459): n equals a,t,g, or c
  misc_feature (482): n equals a,t,g, or c
  misc_feature (503): n equals a,t,g, or c
  misc_feature (511): n equals a,t,g, or c
  misc_feature (538): n equals a,t,g, or c
  misc_feature (561): n equals a,t,g, or c
  misc_feature (565): n equals a,t,g, or c
gggtagctctttgaaggtggataagacttcagaagaggaaaggccagactttgcttaccatcagcatctgcaatgggccaaacacacctcaaattggctgagttgagaaagcagccccagtagttccattcttgcccagcactttctgcattccaaacagcatcctacctgggttttttatccacaaaggttagcggccacatggtttttaaattatgaagaaacacatttgtcctctccttttatccaagcaggaanatcctatatccctgatggttaaaaacaaatccaggccaccctgaatttgctaccccaaaaaagagatttggttaanctgtttcnccggtttgttccctaaggccatattttaaaattaccactctgggggtcccntnaaaaccccngccggggaccatcttgcnntntggttaaaaccccctgtttcaatctctaaatttncccctaaggagggggttggcttnaaaatttgggggaacttatcncccttcangttttttccgggtaccccccccttggngggggaaaccctggctcggggantganaaa

SEQ ID NO: 506 - DNA, 187 bp, Homo sapiens
  misc_feature (8): n equals a,t,g, or c
  misc_feature (99): n equals a,t,g, or c
  misc_feature (140): n equals a,t,g, or c
  misc_feature (178): n equals a,t,g, or c
aattcggnacgagccaaaatggtggaaacagccttaaccccaaatgcctgcaatcctaactaatttaagtaattgctgactgcatagctcttttccttnagaggctctccattttaattcaaaaagttagcatatttatnaaccatgaaatttgaaaaccagggcttttttttttttnggggggttg

SEQ ID NO: 507 - DNA, 68 bp, Homo sapiens
  misc_feature (53): n equals a,t,g, or c
  misc_feature (54): n equals a,t,g, or c
  misc_feature (64): n equals a,t,g, or c
  misc_feature (65): n equals a,t,g, or c
  misc_feature (66): n equals a,t,g, or c
tacgagggtcatttttttttttttttttttttttttttttttttttttttttnncccccccccnnncc

SEQ ID NO: 508 - DNA, 366 bp, Homo sapiens
  misc_feature (3): n equals a,t,g, or c
  misc_feature (7): n equals a,t,g, or c
  misc_feature (25): n equals a,t,g, or c
  misc_feature (46): n equals a,t,g, or c
  misc_feature (50): n equals a,t,g, or c
  misc_feature (70): n equals a,t,g, or c
  misc_feature (95): n equals a,t,g, or c
  misc_feature (118): n equals a,t,g, or c
  misc_feature (160): n equals a,t,g, or c
  misc_feature (161): n equals a,t,g, or c
  misc_feature (172): n equals a,t,g, or c
  misc_feature (241): n equals a,t,g, or c
  misc_feature (302): n equals a,t,g, or c
  misc_feature (303): n equals a,t,g, or c
  misc_feature (314): n equals a,t,g, or c
  misc_feature (332): n equals a,t,g, or c
  misc_feature (339): n equals a,t,g, or c
  misc_feature (348): n equals a,t,g, or c
  misc_feature (364): n equals a,t,g, or c
ggnaganctgaaggacacctgcctnaaagcagagatggaggccttntgtncacggcggattctttgtttnaatcttgcaatgtgctttccttgtngctgggcggatgaatgtttactnaacgatgaaattttaacatccaaagggggataggcacttggnncccccattctnccaaggcccgggggggcggtttcccatgggaatgtgaaaaggctggccattattaagtccctgtaaatnaatgtgaaaccccaccggggcaccccccgtcccccaaagttttggttgtttaaaaataagnnttccatggggnagttttaaaaacctggtngccccgnttttttttnaattaaaataagggtnag

SEQ ID NO: 509 - DNA, 496 bp, Homo sapiens
  misc_feature (53): n equals a,t,g, or c
  misc_feature (62): n equals a,t,g, or c
  misc_feature (75): n equals a,t,g, or c
  misc_feature (99): n equals a,t,g, or c
  misc_feature (111): n equals a,t,g, or c
  misc_feature (146): n equals a,t,g, or c
  misc_feature (148): n equals a,t,g, or c
  misc_feature (201): n equals a,t,g, or c
  misc_feature (242): n equals a,t,g, or c
  misc_feature (282): n equals a,t,g, or c
  misc_feature (320): n equals a,t,g, or c
  misc_feature (346): n equals a,t,g, or c
  misc_feature (353): n equals a,t,g, or c
  misc_feature (374): n equals a,t,g, or c
  misc_feature (382): n equals a,t,g, or c
  misc_feature (413): n equals a,t,g, or c
  misc_feature (450): n equals a,t,g, or c
  misc_feature (486): n equals a,t,g, or c
ggcacgagccagcctccctgtctccagctgcctgggcccggaaggtgtgtggntccttctcngggtctgattttntcactgaactccaccgaccaactnccctaagccccnagggcctccagggaccaggttcgagacccaaaccncnaaaatccaaaacttctcttgaaaagttcagggaccgtccaggggagatggggnggagatatggagtgagtcacctgactccagaagatgccagnttctctctccagggtgcttagttggctttgaccacccctnactccccagggagctctggggcacagcttcctgcacanccctgtgcccaaccacacagctgccntagctgnaccccgagaagtgctcttggntgaccctntggtgtgtggtgaggggtttgtgttcccttnctgtttcagaccctcgattttccgtaatggtttgggngagttggggaggttcaagcagagtgttttattattntcggtttatg

SEQ ID NO: 510 - DNA, 363 bp, Homo sapiens
  misc_feature (3): n equals a,t,g, or c
  misc_feature (25): n equals a,t,g, or c
  misc_feature (282): n equals a,t,g, or c
  misc_feature (339): n equals a,t,g, or c
  misc_feature (352): n equals a,t,g, or c
  misc_feature (354): n equals a,t,g, or c
  misc_feature (361): n equals a,t,g, or c
gcnagaggaaccgcaggttcagacntttggtgtatgtgcttggctgaggagccaatggggcgaagctaccatctgtgggattatgactgaacgcctctaagtcagaatcccgcccaggcggaacgatacggcagcgccgcggagcctcggttggcctcggatagccggtcccccgcctgtccccgccggcgggccgcccccccctccacgcgccccgcgcgcgcgggagggcgcgtgccccgccgcgcgccgggaccggggtccggtgcggagtgcccttcntcctgggaaacggggcccggctggaaaggcggccgtttagaggatccaagcttacgnacgcgtgcatgcnangccatanct

SEQ ID NO: 511 - DNA, 331 bp, Homo sapiens
  misc_feature (1): n equals a,t,g, or c
  misc_feature (9): n equals a,t,g, or c
  misc_feature (15): n equals a,t,g, or c
  misc_feature (66): n equals a,t,g, or c
  misc_feature (90): n equals a,t,g, or c
  misc_feature (276): n equals a,t,g, or c
  misc_feature (301): n equals a,t,g, or c
  misc_feature (312): n equals a,t,g, or c
  misc_feature (318): n equals a,t,g, or c
  misc_feature (330): n equals a,t,g, or c
naggaatangccggnaaagcttctacgcctgcaggtaccggtccggaattcccgggtctacccacntttccgcataggtgttcatactgntacatgcagaacatttgtcaggctctctgtcagctttcatgtacatatggtatagaaaccatggagttaggcacttcctggattttttttttatgagaaaaatactgtatttaaaatgtaaaataaacttttaaaaagcaaaaaaaaaaaaaaaaaaaaaaaaaaaaaaaaaaaaaaaaaaaaaanaaaaaaaaaaaaaaagaaaaacagnttaaaaaacanaaaatnaaaaaaaaaaana

SEQ ID NO: 512 - DNA, 754 bp, Homo sapiens
  misc_feature (572): n equals a,t,g, or c
  misc_feature (667): n equals a,t,g, or c
  misc_feature (724): n equals a,t,g, or c
  misc_feature (748): n equals a,t,g, or c
ggtgatctccccaccttggccttccaaagtgctaggattacaggcgcctagcctaggcagtcattttcaaaaaacaagcatgactcaccaaaagttttaagattttctgtgataatgttcttattgaggcttacattatattacagtttcttgaatctaaaatgatgtaccctcttaggatatatacatcatgcttcattggtctcagggggctgatttttataaggagagatttgctagttttcacaatatgtcctctaagttggcatgtatagctaaacaggctttcataaaaatatacaatttagttaatgaaatttgggatatagtcttttatgattgaaataattttgctaaatagactgtctctgatttattaggtaatcaccactcttattttgttttacttccttaatgtctacatagaaaggaaatgagaaaaatccagaggttgtcatttgacttatgagtctgtttgacttcaggatttggtacatgaaatttcacttaatctttttgatatgtataaaacaaatattctgggtaattatttttatccttttggttttgantcctttttattcctatcatattgaaattggtaagttaattttcctttgaaatattccttatagccaggtctaaaattcaatgggcccacaaccgncaaccgccaacaacaaccaaccccactttactatcatggctgggtgcctccaatttnccttctgggaaccacccagttaanttaaaa

SEQ ID NO: 513 - DNA, 245 bp, Homo sapiens
  misc_feature (7): n equals a,t,g, or c
  misc_feature (67): n equals a,t,g, or c
  misc_feature (76): n equals a,t,g, or c
  misc_feature (81): n equals a,t,g, or c
  misc_feature (131): n equals a,t,g, or c
  misc_feature (179): n equals a,t,g, or c
  misc_feature (207): n equals a,t,g, or c
  misc_feature (232): n equals a,t,g, or c
taaatgntcctttcctttgtagactctggcaaaaggctttaggaagataaaagtttgaggagaacanacaggaatnctganttaagcacagagttgaagtttatacccgattcacatgcttttcaagaatntcgcaattactaagaagcagataatggtgttttttagaaacctaattnaggtatattcaaccaaatacttttaaangtataaaataaatattatacaatanacttgtgtagcag

SEQ ID NO: 514 - DNA, 393 bp, Homo sapiens
  misc_feature (29): n equals a,t,g, or c
  misc_feature (60): n equals a,t,g, or c
  misc_feature (89): n equals a,t,g, or c
  misc_feature (97): n equals a,t,g, or c
  misc_feature (104): n equals a,t,g, or c
  misc_feature (118): n equals a,t,g, or c
  misc_feature (124): n equals a,t,g, or c
  misc_feature (126): n equals a,t,g, or c
  misc_feature (141): n equals a,t,g, or c
  misc_feature (162): n equals a,t,g, or c
  misc_feature (174): n equals a,t,g, or c
  misc_feature (192): n equals a,t,g, or c
  misc_feature (194): n equals a,t,g, or c
  misc_feature (196): n equals a,t,g, or c
  misc_feature (234): n equals a,t,g, or c
  misc_feature (262): n equals a,t,g, or c
  misc_feature (297): n equals a,t,g, or c
  misc_feature (302): n equals a,t,g, or c
  misc_feature (312): n equals a,t,g, or c
  misc_feature (317): n equals a,t,g, or c
  misc_feature (319): n equals a,t,g, or c
  misc_feature (327): n equals a,t,g, or c
  misc_feature (333): n equals a,t,g, or c
  misc_feature (334): n equals a,t,g, or c
  misc_feature (341): n equals a,t,g, or c
  misc_feature (359): n equals a,t,g, or c
  misc_feature (362): n equals a,t,g, or c
  misc_feature (382): n equals a,t,g, or c
aattcggcacgagttttaatatgaaagancctcatgaattaaatagttgatgcaattttnaacgttaattgatataaaaaaaaaaacancaaaattnggcttgnaaaactgacttttncattangngggttttgaaatctngccccagacatactgtgttgngagatacttagngggagggagtaggttttnangnggttgatggtggtggggagggaaggcctcctgaattgngtttgatgcagagctttttagccatgangaatctttcagtcatagtactaataattaaatttncagtntttaaaaagncaagntntttgtccnttttgnntttctgnactccctggaaagttccnttnggcggtggggcccaaagctnttggttttcct

SEQ ID NO: 515 - DNA, 231 bp, Homo sapiens
  misc_feature (87): n equals a,t,g, or c
  misc_feature (114): n equals a,t,g, or c
  misc_feature (121): n equals a,t,g, or c
  misc_feature (200): n equals a,t,g, or c
  misc_feature (206): n equals a,t,g, or c
  misc_feature (208): n equals a,t,g, or c
  misc_feature (223): n equals a,t,g, or c
  misc_feature (230): n equals a,t,g, or c
ggacaaatgttaatcttttgtctccagaaaaagttgggctttcccaagcagttctattacccggttcacaattccttcacccaaaantcatctcatggtatacatggctcctantcctttncattacctgatggtagaaataaaataattcactttaaaaaaaaaaaaaaaaaaaaaaaaaaaaaaaaaaaaaaaagggnggccgntntagaggatccaagtntacgtang

SEQ ID NO: 516 - DNA, 82 bp, Homo sapiens
  misc_feature (14): n equals a,t,g, or c
  misc_feature (22): n equals a,t,g, or c
  misc_feature (36): n equals a,t,g, or c
  misc_feature (67): n equals a,t,g, or c
ggcacgtacggcangagcgaangaaggagtaaggtngtgggatctcaccgtgggtccgattagcctnttctctgccttactt

SEQ ID NO: 517 - DNA, 237 bp, Homo sapiens
  misc_feature (173): n equals a,t,g, or c
  misc_feature (223): n equals a,t,g, or c
aattcggcacgagcccacctccacctgccccactcaccacctctgctagttccagacacctccacgcccacctggtcctctcccatcgcccacaaaagggggggcacgagggacgagcttagctgagctgggaggagcagggtgagggtgggcgacccaggattccccctccncttcccaaataaagatgagggtacttaaagttaaaaaaaaaaaaaaaaanaaaaaaaaaaaaaa

SEQ ID NO: 518 - DNA, 281 bp, Homo sapiens
  misc_feature (35): n equals a,t,g, or c
  misc_feature (116): n equals a,t,g, or c
  misc_feature (134): n equals a,t,g, or c
  misc_feature (230): n equals a,t,g, or c
  misc_feature (243): n equals a,t,g, or c
  misc_feature (259): n equals a,t,g, or c
  misc_feature (263): n equals a,t,g, or c
  misc_feature (265): n equals a,t,g, or c
gctcacgccggccggggccgcgaggcctggtctgngcctcagggaggggccccgggtcctctcagtctttcccctcccccaacgatgtagcgtttttcgttgtttgctttaggttnttgaaacagccccggcgncgcctctattggctctcggccttggcaacggccgtcgtcatggttactggccctaacagccgatggccgaagccgacctgccaccgggcggggtcnctggttggccggncccaggcgcgcggggncgcngnagccgagcattctttt

SEQ ID NO: 519 - DNA, 443 bp, Homo sapiens
  misc_feature (372): n equals a,t,g, or c
  misc_feature (373): n equals a,t,g, or c
  misc_feature (396): n equals a,t,g, or c
  misc_feature (411): n equals a,t,g, or c
  misc_feature (441): n equals a,t,g, or c
tgaagccagctcacagtgctgtgtgccccggtcacctagcaagctgccgaaccaaaagaatttgcaccccgctgcgggcccacgtggttggggccctgccctggcagggtcatcctgtgctcggaggccatctcgggcacaggcccaccccgccccacccctccagaacacggctcacgcttacctcaaccatcctggctgcggcgtctgtctgaaccacgcgggggccttgagggacgctttgtctgtcgtgatggggcaagggcacaagtcctggatgttgtgtgtatcgagaggccaaaggctggtggcaagtgcacggggcacaagcggagtctgtcctgtgacgcgcaagtcttaaggtctggccgnnggccggctgggtctgggcatttntgggtgcaccgcggngctttccagaccaacatgtaaccggcatgntt

SEQ ID NO: 520 - DNA, 129 bp, Homo sapiens
  misc_feature (27): n equals a,t,g, or c
  misc_feature (56): n equals a,t,g, or c
  misc_feature (67): n equals a,t,g, or c
  misc_feature (81): n equals a,t,g, or c
  misc_feature (89): n equals a,t,g, or c
  misc_feature (104): n equals a,t,g, or c
tggttcccccacagtaggtgttttaanataagaattagggtccttttggaaagaantagttgcagtntttataggatagtngtggtaanattctagtttatttnccatttggctaattggtctgtgctg

SEQ ID NO: 521 - DNA, 113 bp, Homo sapiens
  misc_feature (9): n equals a,t,g, or c
  misc_feature (56): n equals a,t,g, or c
  misc_feature (64): n equals a,t,g, or c
  misc_feature (70): n equals a,t,g, or c
  misc_feature (89): n equals a,t,g, or c
  misc_feature (112): n equals a,t,g, or c
ggggggccnggtacccaattgcccctatagtgagtgcgtattacaattgactggancgtggtgntacaangtggtggactgggaaaaancctggggttacccaacttgaatng

SEQ ID NO: 522 - DNA, 393 bp, Homo sapiens
  misc_feature (116): n equals a,t,g, or c
  misc_feature (132): n equals a,t,g, or c
  misc_feature (136): n equals a,t,g, or c
  misc_feature (159): n equals a,t,g, or c
  misc_feature (165): n equals a,t,g, or c
  misc_feature (186): n equals a,t,g, or c
  misc_feature (228): n equals a,t,g, or c
  misc_feature (235): n equals a,t,g, or c
  misc_feature (248): n equals a,t,g, or c
  misc_feature (266): n equals a,t,g, or c
  misc_feature (290): n equals a,t,g, or c
  misc_feature (329): n equals a,t,g, or c
  misc_feature (340): n equals a,t,g, or c
  misc_feature (349): n equals a,t,g, or c
  misc_feature (389): n equals a,t,g, or c
  misc_feature (392): n equals a,t,g, or c
tttcagtttgcaaatagaactaatactggtgaaaatttacctaaaaccttggttatcaaatacatctccagtacattccgttctttttttttttgggactctgtctcaaataaatncataaaaattaaatgngganttcactttgcagttgctgctgtncaacgnacattactcaatctttatgtncggcattctatgctctactggggaaatttgggtaggagtgangtatttngtatacatatctncatttaataatggcaatngctgggtctatcttactattttanctattggataaatattttgtttcccccaggtgctggggntgcaggcgtgnccccactgnggcccggccacattcagttcttatccaagggataaccccngcnt

SEQ ID NO: 523 - DNA, 146 bp, Homo sapiens
  misc_feature (5): n equals a,t,g, or c
  misc_feature (13): n equals a,t,g, or c
  misc_feature (18): n equals a,t,g, or c
  misc_feature (46): n equals a,t,g, or c
  misc_feature (74): n equals a,t,g, or c
  misc_feature (102): n equals a,t,g, or c
  misc_feature (112): n equals a,t,g, or c
  misc_feature (114): n equals a,t,g, or c
  misc_feature (120): n equals a,t,g, or c
ttcantaaatgtngtggnacttccatttgtcaaagcaccaaaacanaggaaccccaaccttacatgtaatacanacttaactcaaaatggatcatatatctnactgtaaaangnaaagcnataaaactgaaaacagactatcttta

SEQ ID NO: 524 - DNA, 346 bp, Homo sapiens
  misc_feature (59): n equals a,t,g, or c
  misc_feature (61): n equals a,t,g, or c
  misc_feature (63): n equals a,t,g, or c
  misc_feature (119): n equals a,t,g, or c
  misc_feature (120): n equals a,t,g, or c
  misc_feature (278): n equals a,t,g, or c
  misc_feature (319): n equals a,t,g, or c
  misc_feature (329): n equals a,t,g, or c
  misc_feature (342): n equals a,t,g, or c
tggggcacggacaccgacgggttgcgactgtgacgtgaggtgttctcgcgcgcgctagntncntgccgggtgccgctgacgggcgtgcgcgcttgtgcggaccggaggtgggggccganncagccaaggttgcgggggccgcagagccggacgaagacggagggcggagcggcttcgggactgcggagactacacaccgagcgagcgcctgggcccgaaggagcgatgctgtggttccagggcgccattccggccgccatcgcgacggccaaaaagancggcgcgtcttcgttgtgttcgtggcagtgatgatgaacantctacacagntggcttcaagttnggaa

SEQ ID NO: 525 - DNA, 470 bp, Homo sapiens
  misc_feature (189): n equals a,t,g, or c
  misc_feature (192): n equals a,t,g, or c
  misc_feature (203): n equals a,t,g, or c
  misc_feature (274): n equals a,t,g, or c
  misc_feature (300): n equals a,t,g, or c
  misc_feature (335): n equals a,t,g, or c
  misc_feature (381): n equals a,t,g, or c
  misc_feature (415): n equals a,t,g, or c
  misc_feature (418): n equals a,t,g, or c
  misc_feature (425): n equals a,t,g, or c
  misc_feature (427): n equals a,t,g, or c
gcttacttttaaccagtgaaattgacctgcccgtgaagaggcgggcataacacagcaagacgagaagaccctatggagctttaatttattaatgcaaacagtacctaacaaacccacaggtcctaaactaccaaacctgcattaaaaatttcggttggggcgacctcggagcagaacccagcctccgancantacatgctaanacttcaccagtcaaagcgaactactatactcgattgatccaataacttgaccaacggaacaagttaccctngggataacagcgcaatcctattctanagtccatatcaacaatagggtttacgacctcgatnttggatcatgacatcccgatggtgcagccgctattaaaggttcgtntgttcaacaattaaagtcctacgtgatctgagtncanaccggantnatccaagtcggtttctatctacttcaaattcctccctgttcga

SEQ ID NO: 526 - DNA, 299 bp, Homo sapiens
  misc_feature (7): n equals a,t,g, or c
  misc_feature (21): n equals a,t,g, or c
  misc_feature (48): n equals a,t,g, or c
  misc_feature (66): n equals a,t,g, or c
  misc_feature (68): n equals a,t,g, or c
  misc_feature (70): n equals a,t,g, or c
  misc_feature (71): n equals a,t,g, or c
  misc_feature (75): n equals a,t,g, or c
  misc_feature (77): n equals a,t,g, or c
  misc_feature (111): n equals a,t,g, or c
  misc_feature (124): n equals a,t,g, or c
  misc_feature (136): n equals a,t,g, or c
  misc_feature (141): n equals a,t,g, or c
  misc_feature (198): n equals a,t,g, or c
  misc_feature (220): n equals a,t,g, or c
  misc_feature (241): n equals a,t,g, or c
  misc_feature (251): n equals a,t,g, or c
  misc_feature (274): n equals a,t,g, or c
  misc_feature (285): n equals a,t,g, or c
cgtacgngtcaaggagaaggncaaagaagaagaccgtgcaaaagcttngtgaaaaagaagaaacantngnngccngnttatagattagaagaggtcaaggataaagatggnaagccactcctgncaaaagagtctnaaggnacagcttccacccatggagtggaagacttccttctggggtggctttgtgtgtagggncttctgctggttccacaaaatngcttcatctgcttaaaatttnaaggatgctnaaacttgctggctggcccatctnctgaagtgggnttcccaaaacccca

SEQ ID NO: 527 - DNA, 323 bp, Homo sapiens
  misc_feature (5): n equals a,t,g, or c
  misc_feature (23): n equals a,t,g, or c
  misc_feature (39): n equals a,t,g, or c
  misc_feature (64): n equals a,t,g, or c
  misc_feature (131): n equals a,t,g, or c
  misc_feature (191): n equals a,t,g, or c
  misc_feature (291): n equals a,t,g, or c
  misc_feature (293): n equals a,t,g, or c
  misc_feature (295): n equals a,t,g, or c
  misc_feature (317): n equals a,t,g, or c
  misc_feature (323): n equals a,t,g, or c
ggcanaaaattagattataactnatagtatgtagagttnagagctttatggtctagattttccnatttgtatttaagttacctaatttaagaaggttttaaaaatggaaattcagtatataatatttgtgnggtttttttccacagtgaaaaatgaaattatgcagaaaatgttccccacaacatgacagngaaaggaattctgggacacgttttttcccagtcccattattttcacagggatcggctggaatacagggtcaaaggatctctttgccagaatgtgccaaantngntgaaaaaggtaactgtttatcnctgatn

SEQ ID NO: 528 - DNA, 220 bp, Homo sapiens
  misc_feature (9): n equals a,t,g, or c
  misc_feature (13): n equals a,t,g, or c
  misc_feature (15): n equals a,t,g, or c
  misc_feature (37): n equals a,t,g, or c
  misc_feature (54): n equals a,t,g, or c
  misc_feature (59): n equals a,t,g, or c
  misc_feature (94): n equals a,t,g, or c
  misc_feature (106): n equals a,t,g, or c
  misc_feature (124): n equals a,t,g, or c
  misc_feature (147): n equals a,t,g, or c
  misc_feature (150): n equals a,t,g, or c
  misc_feature (171): n equals a,t,g, or c
  misc_feature (176): n equals a,t,g, or c
actcttgtncagngngtagtatctggggcgagtgttnggggtaaaagcccaccntacanaaagtggaacagcccggagcctgtatgtgaaaggnccacgggtgttntaagctagggacacggangtccaaacttggaatcaaacggncgnactgttaaattatatcttatnaactnattaaatgaaaacattttgctccgtaaaaagaatataaaaaagt

SEQ ID NO: 529 - DNA, 285 bp, Homo sapiens
ccaagaagaagctttacatattctgggctttcaacctccatttgaagatattaggtttggtcctttcacggggaatacaacacttatgaggtggtttagacaaattaatgaccacttccatgtaaaaggatgctcttatgttctatataagcctcatgggaagaataaaacagcaggagaaactgcttcaggggccctgtcaaagttaacccgtgggattgaaagatgaatcgctggcttatatctatcattgccaaaatcattatttttgtccaattggcttcc

SEQ ID NO: 530 - DNA, 79 bp, Homo sapiens
  misc_feature (5): n equals a,t,g, or c
  misc_feature (8): n equals a,t,g, or c
  misc_feature (25): n equals a,t,g, or c
  misc_feature (28): n equals a,t,g, or c
  misc_feature (33): n equals a,t,g, or c
ggcanagntgcaccacccatgggantgnctggnctgggaacgcttccgatgcaacattaactgtgatgaggacccaaag

SEQ ID NO: 531 - DNA, 236 bp, Homo sapiens
  misc_feature (15): n equals a,t,g, or c
  misc_feature (19): n equals a,t,g, or c
  misc_feature (33): n equals a,t,g, or c
  misc_feature (38): n equals a,t,g, or c
  misc_feature (46): n equals a,t,g, or c
  misc_feature (49): n equals a,t,g, or c
  misc_feature (50): n equals a,t,g, or c
  misc_feature (51): n equals a,t,g, or c
  misc_feature (54): n equals a,t,g, or c
  misc_feature (91): n equals a,t,g, or c
  misc_feature (125): n equals a,t,g, or c
  misc_feature (134): n equals a,t,g, or c
  misc_feature (174): n equals a,t,g, or c
  misc_feature (197): n equals a,t,g, or c
  misc_feature (201): n equals a,t,g, or c
  misc_feature (221): n equals a,t,g, or c
  misc_feature (223): n equals a,t,g, or c
  misc_feature (226): n equals a,t,g, or c
  misc_feature (229): n equals a,t,g, or c
ggcagagtaaaatantttncaggagctccaggnaatgnggcggacncannnttntttagaacacaaatgatggatttagaattggcaatgntgcgtcaaaaccatggtttatcatcatatgactnaggaggagnggtttgaagttgatcagctccagggtttgtgaaaattcantccgcaatggtaactttcaggtncctnggaactgcagctggaggagngnctnctnggccctt

SEQ ID NO: 532 - DNA, 341 bp, Homo sapiens
  misc_feature (17): n equals a,t,g, or c
  misc_feature (20): n equals a,t,g, or c
  misc_feature (66): n equals a,t,g, or c
  misc_feature (74): n equals a,t,g, or c
  misc_feature (81): n equals a,t,g, or c
  misc_feature (101): n equals a,t,g, or c
  misc_feature (109): n equals a,t,g, or c
  misc_feature (142): n equals a,t,g, or c
  misc_feature (181): n equals a,t,g, or c
  misc_feature (220): n equals a,t,g, or c
  misc_feature (222): n equals a,t,g, or c
  misc_feature (224): n equals a,t,g, or c
  misc_feature (228): n equals a,t,g, or c
  misc_feature (229): n equals a,t,g, or c
  misc_feature (238): n equals a,t,g, or c
  misc_feature (241): n equals a,t,g, or c
  misc_feature (255): n equals a,t,g, or c
  misc_feature (279): n equals a,t,g, or c
  misc_feature (285): n equals a,t,g, or c
  misc_feature (288): n equals a,t,g, or c
  misc_feature (292): n equals a,t,g, or c
  misc_feature (321): n equals a,t,g, or c
  misc_feature (332): n equals a,t,g, or c
ggcagaaacgagcactnctnaattaatatctgtatcctggaacaatatttaatggttatgtttttntgtgtgtnagttttnatagtatccatattttaatnactgtttnttacttccatgaaattttaaaaatctgaagggnaaatgttttgtgaaacatttatttttttaaaggaaaagntgaaaggcaggcctatttcatcacaggaccacacacatntncncggnntagggcatncanactcaatggctttntttgtgaaatttgggtgttttttnaatttnttnctgntcaaatggatgtggccaaaaaccttttanctgggttggcntgggaaatt

SEQ ID NO: 533 - DNA, 208 bp, Homo sapiens
  misc_feature (26): n equals a,t,g, or c
  misc_feature (33): n equals a,t,g, or c
  misc_feature (72): n equals a,t,g, or c
  misc_feature (103): n equals a,t,g, or c
  misc_feature (124): n equals a,t,g, or c
  misc_feature (143): n equals a,t,g, or c
  misc_feature (161): n equals a,t,g, or c
  misc_feature (163): n equals a,t,g, or c
  misc_feature (171): n equals a,t,g, or c
  misc_feature (190): n equals a,t,g, or c
  misc_feature (192): n equals a,t,g, or c
ggcagagcatctttgccagtacaggngcttgtnccgtggcccacagcccacagcccacagccatgggctganacctgacggtgaaagatgctggcgggcaacnaattccaggtgtccctgaagncagctgccatgtgggtgtnaaagctgaaggcgcgagntncacccagnaagatcggggtgcacgctntnttagccaggcgtttgg

SEQ ID NO: 534 - DNA, 252 bp, Homo sapiens
  misc_feature (49): n equals a,t,g, or c
  misc_feature (101): n equals a,t,g, or c
  misc_feature (152): n equals a,t,g, or c
  misc_feature (163): n equals a,t,g, or c
  misc_feature (203): n equals a,t,g, or c
  misc_feature (240): n equals a,t,g, or c
  misc_feature (246): n equals a,t,g, or c
  misc_feature (247): n equals a,t,g, or c
  misc_feature (250): n equals a,t,g, or c
  misc_feature (251): n equals a,t,g, or c
ggcagagcactagagcagagtacgagtctaaggcggagggagtaatggnaggacaagcgtttagaaagtttcaacagggtgctgctggcaacatgaaaggnatgatgggaattcaatgaatatgtgaaaggaaaatgcccttgaatatgaanctgaactgcanttgaaatgacctgaatttgcctgagaacctgcagcgtttncccttcctttttgccgaaattgggcggggaaagtgtnattttnnctnng

SEQ ID NO: 535 - DNA, 380 bp, Homo sapiens
  misc_feature (1): n equals a,t,g, or c
  misc_feature (2): n equals a,t,g, or c
  misc_feature (10): n equals a,t,g, or c
  misc_feature (11): n equals a,t,g, or c
  misc_feature (46): n equals a,t,g, or c
  misc_feature (95): n equals a,t,g, or c
  misc_feature (98): n equals a,t,g, or c
  misc_feature (135): n equals a,t,g, or c
  misc_feature (149): n equals a,t,g, or c
  misc_feature (157): n equals a,t,g, or c
  misc_feature (167): n equals a,t,g, or c
  misc_feature (181): n equals a,t,g, or c
  misc_feature (205): n equals a,t,g, or c
  misc_feature (213): n equals a,t,g, or c
  misc_feature (215): n equals a,t,g, or c
  misc_feature (232): n equals a,t,g, or c
  misc_feature (256): n equals a,t,g, or c
  misc_feature (302): n equals a,t,g, or c
  misc_feature (307): n equals a,t,g, or c
  misc_feature (309): n equals a,t,g, or c
  misc_feature (313): n equals a,t,g, or c
  misc_feature (317): n equals a,t,g, or c
  misc_feature (326): n equals a,t,g, or c
  misc_feature (328): n equals a,t,g, or c
  misc_feature (331): n equals a,t,g, or c
  misc_feature (333): n equals a,t,g, or c
  misc_feature (343): n equals a,t,g, or c
  misc_feature (344): n equals a,t,g, or c
  misc_feature (346): n equals a,t,g, or c
  misc_feature (350): n equals a,t,g, or c
  misc_feature (379): n equals a,t,g, or c
nnttcggcanngggggtttaaaactttgctgcttttttacataaangactgtgcctttcctagagagttaagatgtaaatgtgttctcacatgtnaantttgagagttcaggggtctattatggaatgatacacntttttaatgaaccntaaaatanttcactaagntgtttgccttccanagtgtttacccttaagccttaacntgtatctncnttcagaaaaccgttatnttgtgcaaaccatagtaggaaganaaacctttatttgggatataacactactgtaagttatgttacagangctananccancccnctgtgttanantanangagccaaaannancaanagaaaaaaggggaaaagaaaaactaatang

SEQ ID NO: 536 - DNA, 91 bp, Homo sapiens
  misc_feature (15): n equals a,t,g, or c
  misc_feature (34): n equals a,t,g, or c
  misc_feature (39): n equals a,t,g, or c
  misc_feature (55): n equals a,t,g, or c
  misc_feature (68): n equals a,t,g, or c
ggcacgaggtctctngaacacgctgcggggctcncgggnctgagccaggtctgtnctccacgcaggtnttctgcgcgccccgttcagccat

SEQ ID NO: 537 - DNA, 316 bp, Homo sapiens
  misc_feature (164): n equals a,t,g, or c
  misc_feature (232): n equals a,t,g, or c
  misc_feature (277): n equals a,t,g, or c
  misc_feature (288): n equals a,t,g, or c
  misc_feature (290): n equals a,t,g, or c
  misc_feature (314): n equals a,t,g, or c
atcgacccacgcgtccgccaagattaatcatataaccatgggacaaagaattttatagaaatttttaaacatctgataaaacttaagcttctttttcagatgtttaaattttatcatccttttttttctcatgaattcttaaaggattatgctttaatgctgtnatctatcttattgttcttgaaaatacctggcattttttggtatcatgttcaaccaacatcattatganattaattagattcccatggccataaaaatggctttaaaagaatanatatatatttntnaagtagctgagaagcaaatgggcngt

SEQ ID NO: 538 - DNA, 374 bp, Homo sapiens
  misc_feature (6): n equals a,t,g, or c
  misc_feature (11): n equals a,t,g, or c
  misc_feature (13): n equals a,t,g, or c
  misc_feature (16): n equals a,t,g, or c
  misc_feature (31): n equals a,t,g, or c
  misc_feature (272): n equals a,t,g, or c
  misc_feature (303): n equals a,t,g, or c
  misc_feature (306): n equals a,t,g, or c
  misc_feature (335): n equals a,t,g, or c
  misc_feature (352): n equals a,t,g, or c
  misc_feature (354): n equals a,t,g, or c
ggaaanctggncnccntcaggtaccggtccngaattccgggtcgacccacgcgtccgtgctgatccccatcgctgtgggtggtgccctggcggggctggtcctcatcgtcctcatcgcctacctcgtcggcaggaagaggagtcacgcaggctaccagactatctagcctggtgcacgcaggcacagcagctgcaggggcctctgttcctttctctgggcttagggtcctgtcgaagggagggcacactttctggcaaacgtttctcaaatntggttcatccaatgtgaagttccatcttggnaancatttgactatgcacaacagattaattancgaaatggacggtgttnantttggctaaatgggttaaat

SEQ ID NO: 539 - DNA, 109 bp, Homo sapiens
  misc_feature (9): n equals a,t,g, or c
  misc_feature (46): n equals a,t,g, or c
  misc_feature (47): n equals a,t,g, or c
  misc_feature (62): n equals a,t,g, or c
  misc_feature (82): n equals a,t,g, or c
  misc_feature (108): n equals a,t,g, or c
gtgggattnctgtgcaggagggtcgtggtctggctgtggcggaggnncataagaaggtaacncgacctggcgcggcagacanggctcgaagacctcatctttattaana

SEQ ID NO: 540 - DNA, 396 bp, Homo sapiens
  misc_feature (268): n equals a,t,g, or c
  misc_feature (340): n equals a,t,g, or c
  misc_feature (353): n equals a,t,g, or c
  misc_feature (366): n equals a,t,g, or c
  misc_feature (390): n equals a,t,g, or c
  misc_feature (393): n equals a,t,g, or c
tctgaccttttgggttttaagcaggaggtgtcagaaaagttaccacagggataactggcttgtggcggccaagcgttcatagcgacgtcgctttttgatccttcgatgtcggctcttcctatcattgtgaagcagaattcaccaagcgttggattgttcacccactaatagggaacgtgagctggggtttagaccgtcgtgagacaggttagttttaccctactgatgatgtgttgttgccatggtaatcctgctcagtacgagaggnaccgcagttcagacattggtgtatgtgctgggctgaggagccaatggggcgaaactacccatctgtggggantatgactgaacgncttctaagtcagnatcccgcccaagcggaaacgatanggnagc

SEQ ID NO: 541 - DNA, 429 bp, Homo sapiens
  misc_feature (314): n equals a,t,g, or c
  misc_feature (353): n equals a,t,g, or c
  misc_feature (382): n equals a,t,g, or c
  misc_feature (414): n equals a,t,g, or c
  misc_feature (418): n equals a,t,g, or c
  misc_feature (419): n equals a,t,g, or c
ttgggttttaagcaggaggtgtcagaaaagttaccacagggataactggcttgtggcggccaagcgttcatagcgacgtcgctgtttgatccttcgatgtcggctcttcctatcattgtgaagcagaattcaccaagcgttggattgttcacccactaatagggaacgtgagctgggtttagaccgtcgtgagacaggttagttttaccctactgatgatgtgttgttgccatggtaatcctgctcagtacgagaggaaccgcagttcagacatttggtgtatgtgcttggctgaggagccaatggggcgaacnaccatctgtgggattatgactgaacgcctctaagtcagnatcccgcccaggcggaacgatacggccancgccgcggagcctcggttggcctcggatagancggnnccccgcctgt

SEQ ID NO: 542 - DNA, 617 bp, Homo sapiens
  misc_feature (11): n equals a,t,g, or c
  misc_feature (18): n equals a,t,g, or c
  misc_feature (25): n equals a,t,g, or c
  misc_feature (49): n equals a,t,g, or c
  misc_feature (52): n equals a,t,g, or c
  misc_feature (552): n equals a,t,g, or c
  misc_feature (588): n equals a,t,g, or c
  misc_feature (601): n equals a,t,g, or c
  misc_feature (609): n equals a,t,g, or c
  misc_feature (612): n equals a,t,g, or c
cacgtagtagnggaaacntggtacnccgtgcaggtaccggtccggaatnccngggtcgacccacgcgtccgagtttccctcaggatagctggcgctctcgcagacccgacgcacccccgccacgcagttttatccggtaaagcgaatgattagaggtcttggggccgaaacgatctcaacctattctcaaactttaaatgggtaagaagcccggctcgctggcgtggagccgggcgtggaatgcgagtgcctagtgggccacttttggtaagcagaactggcgctgcgggatgaaccgaacgccgggttaaggcgcccgatgccgacgctcatcagaccccagaaaaggtgttggttgatatagacagcaggacggtggccatggaagtcggaatccgctaaggagtgtgtaacaactcacctgccgaatcaactagccctgaaaatggatggcgctggagcgtcgggcccatacccggccgtcgccggcagtcgagagtggacgggagcggcgggggcggcgcgcgcgcgcgccgtgttggtgttcgccgncttcccagtgggcaagcgccccaacccccttccttnttggttcctcttnccccaatnggnaacaa

SEQ ID NO: 543 - DNA, 302 bp, Homo sapiens
  misc_feature (134): n equals a,t,g, or c
  misc_feature (135): n equals a,t,g, or c
  misc_feature (148): n equals a,t,g, or c
  misc_feature (156): n equals a,t,g, or c
  misc_feature (281): n equals a,t,g, or c
  misc_feature (282): n equals a,t,g, or c
  misc_feature (293): n equals a,t,g, or c
  misc_feature (295): n equals a,t,g, or c
  misc_feature (299): n equals a,t,g, or c
acccacgcgtccgaaatacttaaaatgaggaataagaatggagatgttacatctggtagatgtacattgctaccagattatggatggactgatctgaaaatcaacctcaactcaagggtggtcagctcaatggnncacagagcacggncttttggnttctttgcagtactttgaatttatttttctacctatatatgttttatatgctgctggtgctccattaaagttttactctgtgttgcaaaaaaaaaaaaaaaaaaaaaaaaaaaggggggcccccnntaaggggcccnantttngga

SEQ ID NO: 544 - DNA, 534 bp, Homo sapiens
  misc_feature (99): n equals a,t,g, or c
  misc_feature (141): n equals a,t,g, or c
  misc_feature (142): n equals a,t,g, or c
  misc_feature (174): n equals a,t,g, or c
  misc_feature (252): n equals a,t,g, or c
  misc_feature (281): n equals a,t,g, or c
  misc_feature (283): n equals a,t,g, or c
  misc_feature (290): n equals a,t,g, or c
  misc_feature (296): n equals a,t,g, or c
  misc_feature (317): n equals a,t,g, or c
  misc_feature (318): n equals a,t,g, or c
  misc_feature (320): n equals a,t,g, or c
  misc_feature (327): n equals a,t,g, or c
  misc_feature (332): n equals a,t,g, or c
  misc_feature (336): n equals a,t,g, or c
  misc_feature (338): n equals a,t,g, or c
  misc_feature (348): n equals a,t,g, or c
  misc_feature (352): n equals a,t,g, or c
  misc_feature (384): n equals a,t,g, or c
  misc_feature (386): n equals a,t,g, or c
  misc_feature (393): n equals a,t,g, or c
  misc_feature (419): n equals a,t,g, or c
  misc_feature (426): n equals a,t,g, or c
  misc_feature (436): n equals a,t,g, or c
  misc_feature (461): n equals a,t,g, or c
  misc_feature (483): n equals a,t,g, or c
  misc_feature (493): n equals a,t,g, or c
  misc_feature (498): n equals a,t,g, or c
gcaagggaaagatgaaaaattataaccaagcataatatagcaaggactaacccctataccttctgcataatgaattaactagaaataactttgcaaggnagagccaaagctaagacccccgaaaccaaacgagctaccttnnagaacgctaaaagagcacacccgtctatgttngccaaatagtggaaaaaatttataggttgaaggcgaacaaacctaccgacctggtaatactggtttgttccaaaatanatcttaatttccacttttaattttgcccncnaaacccnctaatncccctttttaatttactgttnngntcccaanaaggnaacncnctttgggacncttngaaaaaccttttttaaaaaaattttaaatttntnccccttntgggggccctaaaccccccccctttnaaaaggntttttcaccncccccccccccccgaaacccccccntttttttttccccccccccctnggaccctttnccccnaaaaaaattttttttttttttaaaaacccccccccc

SEQ ID NO: 545 - DNA, 355 bp, Homo sapiens
  misc_feature (1): n equals a,t,g, or c
  misc_feature (14): n equals a,t,g, or c
  misc_feature (38): n equals a,t,g, or c
  misc_feature (43): n equals a,t,g, or c
  misc_feature (82): n equals a,t,g, or c
  misc_feature (94): n equals a,t,g, or c
  misc_feature (169): n equals a,t,g, or c
  misc_feature (247): n equals a,t,g, or c
  misc_feature (279): n equals a,t,g, or c
  misc_feature (281): n equals a,t,g, or c
  misc_feature (299): n equals a,t,g, or c
  misc_feature (337): n equals a,t,g, or c
  misc_feature (355): n equals a,t,g, or c
ngcaacaggaaagnccaggaggacctctgaggccacgnctganccttcttggctggggcaaactactcttcaagtggtggcncagtcccagcanggcagtccgcctctccccctgctgagactttaatctccaccagcccttaaagtgtcggccgctctgtgactgganttatgctcttttgaaatgtcacaaggccgcctcccatctctgggggtattgttacaaattcttcctctccctgaaatngcctttcctgctttcctccgtgggtaagttcnancaaatttcctctagcttncctggaaggaatcactccccccaaggaaacctcccttnccttttcctggggtgttn

SEQ ID NO: 546 - DNA, 269 bp, Homo sapiens
  misc_feature (178): n equals a,t,g, or c
  misc_feature (232): n equals a,t,g, or c
  misc_feature (252): n equals a,t,g, or c
  misc_feature (267): n equals a,t,g, or c
  misc_feature (268): n equals a,t,g, or c
gtttttcatcaagttcctaagagctgacttggagattttattcccagggctccactgctaggattcttctcactagttctaacaaaatctgtgatgttaaatgactgatgctctcaattgtgatccagagttttaaataaatgaaatcaaggtgggattttgggaatatatcctgaantttaacatcttgatgttccttcttgtttgttaaaaaaaaaaaaaaaaactcganggggggcccggtacccaatnccccctaatagtgannc

SEQ ID NO: 547 - DNA, 82 bp, Homo sapiens
  misc_feature (38): n equals a,t,g, or c
  misc_feature (40): n equals a,t,g, or c
  misc_feature (54): n equals a,t,g, or c
  misc_feature (56): n equals a,t,g, or c
  misc_feature (63): n equals a,t,g, or c
ggaaaacatggaaaaggatctggaaagtgggcttgcanangcttgggacggaanancctgatnccggccctgatggtcacgg

SEQ ID NO: 548 - DNA, 362 bp, Homo sapiens
  misc_feature (284): n equals a,t,g, or c
  misc_feature (311): n equals a,t,g, or c
  misc_feature (338): n equals a,t,g, or c
  misc_feature (344): n equals a,t,g, or c
  misc_feature (360): n equals a,t,g, or c
caatcacctattcacttctcatgcacccggatgctctggaagagcctgatgaccagaaccgtatttagtctccattgtcttgcattgggatttgagaagaaaatcagagagggaagatctggtatttcctggcctaaattccccttggggaggacagggagatgctgcagttccaaaagagaaggtttcttccagagtcatctacctgagtcctgaagctccctgtcctgaaagccacagacaatatggtccccaataaccgaatgcaccttctgtgcttccancttcttccttgaaattcaagggtcttnccgtttccccattcccccccaggccantccaanttattccaaaccctgntt

SEQ ID NO: 549 - DNA, 448 bp, Homo sapiens
  misc_feature (159): n equals a,t,g, or c
  misc_feature (239): n equals a,t,g, or c
  misc_feature (251): n equals a,t,g, or c
  misc_feature (259): n equals a,t,g, or c
  misc_feature (281): n equals a,t,g, or c
  misc_feature (284): n equals a,t,g, or c
  misc_feature (299): n equals a,t,g, or c
  misc_feature (301): n equals a,t,g, or c
  misc_feature (319): n equals a,t,g, or c
  misc_feature (343): n equals a,t,g, or c
  misc_feature (374): n equals a,t,g, or c
  misc_feature (396): n equals a,t,g, or c
  misc_feature (437): n equals a,t,g, or c
  misc_feature (446): n equals a,t,g, or c
ggatggcaggagagcttgtcattgagcctggcaatttagcaaactgatgctgaggatgattgaggtgggtctacctcatctctgaaaattctggaaggaatggaggagtctcaacatgtgtttctgacacaagatccgtggtttgtactcaaagcccanaatccccaagtgcctgcttttgatgatgtctacagaaaatgctggctgactgaacacatttgcccaattccaggtgtgcncagaaaaccganaatattcnaaattcccaatttttttcttangancaagaaaaaaatgtngncctaaaaggggttaattnaaggggttaggggttatgaaagancttgatttggatctctttttattttaatttnaatttcacttttgacatccaanaaaaactttgttgaaatacttctgttctcaatgttttgganaaaaatcancc

SEQ ID NO: 550 - DNA, 502 bp, Homo sapiens
  misc_feature (13): n equals a,t,g, or c
  misc_feature (25): n equals a,t,g, or c
  misc_feature (153): n equals a,t,g, or c
  misc_feature (158): n equals a,t,g, or c
  misc_feature (207): n equals a,t,g, or c
  misc_feature (296): n equals a,t,g, or c
  misc_feature (318): n equals a,t,g, or c
  misc_feature (327): n equals a,t,g, or c
  misc_feature (329): n equals a,t,g, or c
  misc_feature (342): n equals a,t,g, or c
  misc_feature (381): n equals a,t,g, or c
  misc_feature (412): n equals a,t,g, or c
  misc_feature (427): n equals a,t,g, or c
  misc_feature (463): n equals a,t,g, or c
  misc_feature (493): n equals a,t,g, or c
aattcggcagagnaaaccatttacncaaataaagtataggcgatagaaattgaaacctggcgcaatagatatagtaccgcaaggagaagatgaaaaattataaccaagcataatatagcaaggacttaacccctataccttctggcataatgnaattnaactaggaaatgaactttgcaagggggagccaaagcttaagacccccgnaaaccagacggagcttaccttaaggaacagcttaaaagaggcacacccgtcttatgtaggcaaaatagtggggaaggttttttaggttngaggcggaccaaaccttaccgnggcctggtngntagcttggttgtnccaggttaggatcttttagtttccaactttaaattttgncccacaggaacccttttaaatccccttgttnaattttaaccgtttngtccccaggggggaccagttttttggccattggggnaaaaccttttggggggggttaaaaattttncccccctgg

SEQ ID NO: 551 - DNA, 119 bp, Homo sapiens
  misc_feature (35): n equals a,t,g, or c
  misc_feature (57): n equals a,t,g, or c
  misc_feature (98): n equals a,t,g, or c
  misc_feature (104): n equals a,t,g, or c
  misc_feature (107): n equals a,t,g, or c
aaaaaggaaattaagagaaggtagaaatttaaatnttttaatgaaaataatgctttnaatcattaaaacaggatatgaatactccaatcctttttaanattatnacngttttcaaaatt

SEQ ID NO: 552 - DNA, 396 bp, Homo sapiens
  misc_feature (209): n equals a,t,g, or c
  misc_feature (357): n equals a,t,g, or c
  misc_feature (370): n equals a,t,g, or c
  misc_feature (373): n equals a,t,g, or c
  misc_feature (379): n equals a,t,g, or c
  misc_feature (389): n equals a,t,g, or c
gtagtaaattgaaacctggcgcaatagatatagtaccgcaagggaaagatgaaaaattataaccaagcataatatagcaaggactaacccctataccttctgcataatgaattaactagaaataactttgcaaggagagccaaagctaagacccccgaaaccagacgagctacctaagaaacagctaaaagagcacacccgtctatgtngcaaaatagtgggaagatttataggttgaggcgacaaacctaccgagcctggtgatagctggttgtccaagataaatcttagttcaactttaatttgcccacagaacctctaatccccttgttaatttactgtttgtccaaagaagancactctttggacnctnggaaanccttgtaaanaaattaa

SEQ ID NO: 553 - DNA, 253 bp, Homo sapiens
  misc_feature (4): n equals a,t,g, or c
  misc_feature (96): n equals a,t,g, or c
  misc_feature (100): n equals a,t,g, or c
  misc_feature (203): n equals a,t,g, or c
  misc_feature (216): n equals a,t,g, or c
  misc_feature (218): n equals a,t,g, or c
  misc_feature (221): n equals a,t,g, or c
  misc_feature (230): n equals a,t,g, or c
gaanatcgaaaggagaaaaaaagccgagatgtagtctctaagaaagaggaacgtaagcgtacaaaaaagaaaaggaacaaagccaagaaaggacanagangaaatgctttgggaccagtctattcttggattttgaactttcaaattggttctcccaagttaaattgaaaaatagtgagacttggttttatgaatcgtgttcntacactttcttantnatnggtcctttnctcctaccaaggctattaacaat

SEQ ID NO: 554 - DNA, 431 bp, Homo sapiens
  misc_feature (277): n equals a,t,g, or c
  misc_feature (306): n equals a,t,g, or c
  misc_feature (354): n equals a,t,g, or c
  misc_feature (383): n equals a,t,g, or c
  misc_feature (395): n equals a,t,g, or c
  misc_feature (399): n equals a,t,g, or c
  misc_feature (417): n equals a,t,g, or c
  misc_feature (430): n equals a,t,g, or c
gcccaaacccactccaccttactaccagacaaccttagccaaaccatttacccaaataaagtataggcgatagaaattgaaacctggcgcaatagatatagtaccgcaagggaaagatgaaaaattataaccaagcataatatagcaaggactaacccctataccttctgcataatgaattaactagaaataactttgcaaggagagccaaagctaagacccccgaaaccagacgagctacctaagaacagctaaaagagcacacccgtctatgttngcaaaatagtgggaaaaatttataggttngaagcgacaaacctacgagcctggtgatactggttgttcccagaatanaatcttagtttcacttttaattttggccncagaaccccctnaatncccttggttaatttactntttagttccaaana

SEQ ID NO: 555 - DNA, 489 bp, Homo sapiens
  misc_feature (13): n equals a,t,g, or c
  misc_feature (17): n equals a,t,g, or c
  misc_feature (24): n equals a,t,g, or c
  misc_feature (97): n equals a,t,g, or c
  misc_feature (109): n equals a,t,g, or c
  misc_feature (113): n equals a,t,g, or c
  misc_feature (127): n equals a,t,g, or c
  misc_feature (137): n equals a,t,g, or c
  misc_feature (138): n equals a,t,g, or c
  misc_feature (163): n equals a,t,g, or c
  misc_feature (164): n equals a,t,g, or c
  misc_feature (179): n equals a,t,g, or c
  misc_feature (184): n equals a,t,g, or c
  misc_feature (186): n equals a,t,g, or c
  misc_feature (198): n equals a,t,g, or c
  misc_feature (232): n equals a,t,g, or c
  misc_feature (246): n equals a,t,g, or c
  misc_feature (276): n equals a,t,g, or c
  misc_feature (322): n equals a,t,g, or c
  misc_feature (332): n equals a,t,g, or c
  misc_feature (346): n equals a,t,g, or c
  misc_feature (350): n equals a,t,g, or c
  misc_feature (368): n equals a,t,g, or c
  misc_feature (382): n equals a,t,g, or c
  misc_feature (411): n equals a,t,g, or c
  misc_feature (413): n equals a,t,g, or c
  misc_feature (459): n equals a,t,g, or c
  misc_feature (486): n equals a,t,g, or c
  misc_feature (488): n equals a,t,g, or c
gacccactccacntgcnaaagctnaaactactctgctttctcacttacctacacttttgacttaccacatacatctctctcttcggatatgagctgnaaactccttatntcancgctctaactctgnagtcctaatnnttctagttggaccaaaaaaaatccnnattgtttgatctaangagangnaatttaccaatnctgtatacgcatgtgtgtgtgtcgcttaaacganctgtccggttatanaaaatcctgatcgtcataaatcatgtctanacatcatgtaatgaattgcacgatttaatattgtccctattagcantcactacaanctatttctcaaatntacntatttctccgtaaacaancattcagtactccntcggatctctaaaaatcctctatgatctntncacatcactgataaagaccaattcgtatatacatgactgtccttancacatattcactatcagtagaaaagcnanc

SEQ ID NO: 556 - DNA, 77 bp, Homo sapiens
  misc_feature (13): n equals a,t,g, or c
  misc_feature (26): n equals a,t,g, or c
  misc_feature (66): n equals a,t,g, or c
  misc_feature (75): n equals a,t,g, or c
ggaaaatattatncagtaaacaatantgtgtgaacttttaaaatggataatagggcatggactgantgctgctanct

SEQ ID NO: 557 - DNA, 506 bp, Homo sapiens
  misc_feature (221): n equals a,t,g, or c
  misc_feature (228): n equals a,t,g, or c
  misc_feature (270): n equals a,t,g, or c
  misc_feature (286): n equals a,t,g, or c
  misc_feature (293): n equals a,t,g, or c
  misc_feature (294): n equals a,t,g, or c
  misc_feature (333): n equals a,t,g, or c
  misc_feature (339): n equals a,t,g, or c
  misc_feature (343): n equals a,t,g, or c
  misc_feature (350): n equals a,t,g, or c
  misc_feature (369): n equals a,t,g, or c
  misc_feature (402): n equals a,t,g, or c
  misc_feature (466): n equals a,t,g, or c
  misc_feature (471): n equals a,t,g, or c
  misc_feature (480): n equals a,t,g, or c
  misc_feature (482): n equals a,t,g, or c
  misc_feature (501): n equals a,t,g, or c
gcccactccaccttactaccagacaaccttagccaaaccatttacccaaataaagtataggcgatagaaattgaaacctggcgcaatagatatagtaccgcagggaaagatgaaaaattataaccaagcataatatagcaaggactaacccctataccttctgcataatgaattaactagaaataactttgcaaggagagccaaagctaagacccccgaanccagacnagctaccttagaacagcttaaagagcacacccgtctatgttncaaaatagtgggaaanatttatnngttgaagcgacaaacctaccgacctggtgatactggttntccaanatanatcttanttcactttaatttgccacngaacctcttaatcccttgttaatttactgttantccaaaaaagacactctttggacctaggaaaaaacctttttaaaaaattaaaaatttacacccnttttnggctaaaancngcccccattttaaaaaagnttcaa

SEQ ID NO: 558 - DNA, 298 bp, Homo sapiens
  misc_feature (65): n equals a,t,g, or c
  misc_feature (150): n equals a,t,g, or c
  misc_feature (166): n equals a,t,g, or c
  misc_feature (252): n equals a,t,g, or c
  misc_feature (263): n equals a,t,g, or c
  misc_feature (269): n equals a,t,g, or c
  misc_feature (286): n equals a,t,g, or c
  misc_feature (291): n equals a,t,g, or c
gtattatcaataacaataaaaataaagcaaatacattagacattaccctcccatcaggtgcacanaagaaagtcaaggctggaatttcattctcttatctaaatctctctgttctctctcagggaatattttcagagaataggtggaatnaagtgaggctgtgganaatgttatctataataggatagactttcttctgtgcacctgatgggagggtaatgtctaatgtattatcagtaacagtaaaaatanagcaaataccngaaaantaaataagggggggccnttctnaaaaatc

SEQ ID NO: 559 - DNA, 295 bp, Homo sapiens
  misc_feature (10): n equals a,t,g, or c
  misc_feature (19): n equals a,t,g, or c
  misc_feature (29): n equals a,t,g, or c
  misc_feature (51): n equals a,t,g, or c
  misc_feature (76): n equals a,t,g, or c
  misc_feature (109): n equals a,t,g, or c
  misc_feature (128): n equals a,t,g, or c
  misc_feature (177): n equals a,t,g, or c
  misc_feature (183): n equals a,t,g, or c
  misc_feature (186): n equals a,t,g, or c
  misc_feature (187): n equals a,t,g, or c
  misc_feature (201): n equals a,t,g, or c
  misc_feature (234): n equals a,t,g, or c
  misc_feature (276): n equals a,t,g, or c
  misc_feature (286): n equals a,t,g, or c
  misc_feature (290): n equals a,t,g, or c
acaaagtgancggtctggnaagtcccggnccggaaattcccgggtcgaccngaaccgtccggataaatactgtcantccattgatttatctcctcctgtcccccatctnaaatacccatgctgctttnctgagtgttgatgggggttaccatcttgatccactgttgctcttagaangcccanaanntctttgggcattgncaaggaaatcccggattatctggaaaaccctcnctttctcttcacggctgtaccagaaaatccctaagacagatnttgcggtggncgancaata

SEQ ID NO: 560 - DNA, 371 bp, Homo sapiens
  misc_feature (4): n equals a,t,g, or c
  misc_feature (41): n equals a,t,g, or c
  misc_feature (45): n equals a,t,g, or c
  misc_feature (114): n equals a,t,g, or c
  misc_feature (127): n equals a,t,g, or c
  misc_feature (161): n equals a,t,g, or c
  misc_feature (265): n equals a,t,g, or c
  misc_feature (299): n equals a,t,g, or c
  misc_feature (311): n equals a,t,g, or c
  misc_feature (341): n equals a,t,g, or c
  misc_feature (350): n equals a,t,g, or c
  misc_feature (360): n equals a,t,g, or c
gctnttttctgccgccaagcgcccggccgcgcgccggccgncgcnacccgctccggggacagtgccaggtggggagtttgactggggcggtacacctgtcaaacggtaacgcangtgtcctaaggcnagctcagggaggacagaaacctcccgtggagcanaagggcaaaagctcgcttgatcttgattttcagtacgaatacaagaccgtgaaagcggggcctcacgatccttctgaccttttgggttttaagcaggaggtgtnagaaaagttaccacagggataactggcttgtggnggccaagcgtanatagcgacgtcctttttgatccttcgatgncggctcttnctatcattgngaagcataatt

SEQ ID NO: 561 - DNA, 205 bp, Homo sapiens
  misc_feature (2): n equals a,t,g, or c
  misc_feature (35): n equals a,t,g, or c
  misc_feature (67): n equals a,t,g, or c
  misc_feature (186): n equals a,t,g, or c
  misc_feature (193): n equals a,t,g, or c
  misc_feature (200): n equals a,t,g, or c
  misc_feature (201): n equals a,t,g, or c
  misc_feature (202): n equals a,t,g, or c
tnaaagcccccgcgaggggcccggggcggggtccnttaaacctgcgggccgccggtgaaataccacnactctgatcgttttttcactgacccggtgaggcgggggggcgagccccgaggggctctcgcttctggcgccaagcgcccggccgcgcgccggccgggcgcgacccgctccggggacagngccaggnggggagnnngac

SEQ ID NO: 562 - DNA, 580 bp, Homo sapiens
  misc_feature (3): n equals a,t,g, or c
  misc_feature (4): n equals a,t,g, or c
  misc_feature (19): n equals a,t,g, or c
  misc_feature (21): n equals a,t,g, or c
  misc_feature (23): n equals a,t,g, or c
  misc_feature (108): n equals a,t,g, or c
  misc_feature (114): n equals a,t,g, or c
  misc_feature (131): n equals a,t,g, or c
  misc_feature (383): n equals a,t,g, or c
  misc_feature (386): n equals a,t,g, or c
  misc_feature (448): n equals a,t,g, or c
  misc_feature (480): n equals a,t,g, or c
  misc_feature (511): n equals a,t,g, or c
  misc_feature (515): n equals a,t,g, or c
  misc_feature (542): n equals a,t,g, or c
  misc_feature (561): n equals a,t,g, or c
  misc_feature (569): n equals a,t,g, or c
ttnngactatagttttagntnanacccctgcaggtaccggtccggaattcccgggtcgacccacgcgtccgcccatttttccggttgataatgcaatagataatgggnaagaanttcaagttgcattgccnatcttaatggcagcttatgcaatggcggaagcgtttatgtcaacaggagttggagcttctcttatcctaattgcattaaaagtaggaattactgctaaaactgttgcagttataggagctattgtcacatcaatattatcaatagcaactgggacaagttggggaacatttgcagcctgtgcacctatttttttatggctaaatcatatagttggcggaaatattttatttgacaacaagcagctattgcangangagcatgttttggaagataatataggactatttcagatactacaatagtaaagtctggtatncaaaaaagtttgaaagttgtaagaaagaattngacacccaaggtggtatgggcaagcattagntttnataattcaaggaattaataggcatttncttaatgggtgggatttancaatgggnatttaaccctt

SEQ ID NO: 563 - DNA, 198 bp, Homo sapiens
  misc_feature (2): n equals a,t,g, or c
  misc_feature (4): n equals a,t,g, or c
  misc_feature (39): n equals a,t,g, or c
  misc_feature (78): n equals a,t,g, or c
  misc_feature (91): n equals a,t,g, or c
  misc_feature (130): n equals a,t,g, or c
  misc_feature (132): n equals a,t,g, or c
  misc_feature (164): n equals a,t,g, or c
  misc_feature (173): n equals a,t,g, or c
  misc_feature (197): n equals a,t,g, or c
gngngccctaggcctcgcgctgcccggccggctcctcgngtcccactcccggcgcacgccctcccgcgagtcccgggnccctcccgcgccnctatactcggcgcgcgcgcagcatggcgcccccgcaggncntcacgttcgggcttctgattgccgcggcgacngcgactttngccgcagctcaggaagaatggagna

SEQ ID NO: 564 - DNA, 176 bp, Homo sapiens
  misc_feature (7): n equals a,t,g, or c
  misc_feature (22): n equals a,t,g, or c
  misc_feature (25): n equals a,t,g, or c
  misc_feature (36): n equals a,t,g, or c
  misc_feature (70): n equals a,t,g, or c
  misc_feature (104): n equals a,t,g, or c
  misc_feature (121): n equals a,t,g, or c
  misc_feature (133): n equals a,t,g, or c
  misc_feature (139): n equals a,t,g, or c
  misc_feature (144): n equals a,t,g, or c
caactgnagctcattctgttanagntcctcattcanctggtcactgtggacagagggtgttggcctgctnccttctaagtattcttaaagccatggatttttgnggaccattttcttctgntcttccttgagntatttnctttntttgctatcttgggactcttctttgtgcttga

SEQ ID NO: 565 - DNA, 264 bp, Homo sapiens
  misc_feature (4): n equals a,t,g, or c
  misc_feature (23): n equals a,t,g, or c
  misc_feature (30): n equals a,t,g, or c
  misc_feature (47): n equals a,t,g, or c
  misc_feature (139): n equals a,t,g, or c
  misc_feature (246): n equals a,t,g, or c
  misc_feature (253): n equals a,t,g, or c
  misc_feature (254): n equals a,t,g, or c
  misc_feature (255): n equals a,t,g, or c
  misc_feature (257): n equals a,t,g, or c
gcangtattctacctaaatcttncaatttnctttaaatggtaagagnttctaaaacagacaataatttaacaagctcagctctgctttatctgagtttagtggtcctaatatatatgtagagaaagatggtggggttgntcacctctgtacagaccatctgtatgttaggtgacattgattatgggttataatcagggaaactaattggatttagtgacaaaaataaaaagttttttttttatganaaaaaannnangggggac

SEQ ID NO: 566 - DNA, 411 bp, Homo sapiens
  misc_feature (1): n equals a,t,g, or c
  misc_feature (96): n equals a,t,g, or c
  misc_feature (101): n equals a,t,g, or c
  misc_feature (110): n equals a,t,g, or c
  misc_feature (142): n equals a,t,g, or c
  misc_feature (178): n equals a,t,g, or c
  misc_feature (206): n equals a,t,g, or c
  misc_feature (291): n equals a,t,g, or c
  misc_feature (295): n equals a,t,g, or c
  misc_feature (335): n equals a,t,g, or c
  misc_feature (382): n equals a,t,g, or c
  misc_feature (385): n equals a,t,g, or c
  misc_feature (387): n equals a,t,g, or c
  misc_feature (393): n equals a,t,g, or c
nggacattgaagccaaaccaagccactatcagctggtgagtggaagcagcacggaggactcgctccatgttcatgctcagatggcagagaatgaanaaganggtagtggnggcggaggcagtgaagaggatcccccctgcanacaccaaagctgtgaacagaaagactgcctggccancaaaccttgggacatcagcctggcccancctgaaagcatccgcagtgacctagagagttcttgatgcacagtctgacgatgtgccagacatcaccttcagaatgaaatgtggnttcncccgctcccatactgcagcctgcccctcgacccccagagnccaaggtgcaccgagcccaagtgcccatatgaacctctctgccctanccnanggacanactgtcttgaagccagaa

SEQ ID NO: 567 - DNA, 208 bp, Homo sapiens
  misc_feature (28): n equals a,t,g, or c
  misc_feature (181): n equals a,t,g, or c
  misc_feature (194): n equals a,t,g, or c
  misc_feature (201): n equals a,t,g, or c
  misc_feature (202): n equals a,t,g, or c
  misc_feature (206): n equals a,t,g, or c
ggggaaagggacctttccgaaaaacatnttttggggaaataaaaatgtggactgtgaaaaaaaaaaaaaaaaaaaaaaaaaaaaaaaaaaaaaaaaaaaaaaaaaaaaaaaaaaaaaaaaaaaaaaaaaaaaaaaaaaaaaaaaaaaaaaaaaaaaaaaaaaaaaaaaaaaaaaaaaaaanggggggccttttnaaaaaannaaantt

SEQ ID NO: 568 - DNA, 322 bp, Homo sapiens
  misc_feature (1): n equals a,t,g, or c
  misc_feature (11): n equals a,t,g, or c
  misc_feature (191): n equals a,t,g, or c
  misc_feature (204): n equals a,t,g, or c
  misc_feature (291): n equals a,t,g, or c
  misc_feature (300): n equals a,t,g, or c
  misc_feature (306): n equals a,t,g, or c
  misc_feature (320): n equals a,t,g, or c
  misc_feature (321): n equals a,t,g, or c
ncttggtctancctggctgctcagaaagagcagtcaggacttgagggaagcatcaaattctatacccataaactgcagttggaagtcagctttttgaaatgtccagcctttgcccaattgtttcagatcatctcattcctcaggctttggcaggtatcctgccctccatcttattccagtgtgttcacctnatcaaggcagcanagtggatgaaggagtaagtctgccctttgccatactgaacagctgtggaccccgattggtgagggctctgcatatgcctgtatgaangagatacangtgtgngtgcacatgccggnnt

SEQ ID NO: 569 - DNA, 594 bp, Homo sapiens
  misc_feature (285): n equals a,t,g, or c
  misc_feature (487): n equals a,t,g, or c
  misc_feature (499): n equals a,t,g, or c
  misc_feature (541): n equals a,t,g, or c
  misc_feature (575): n equals a,t,g, or c
  misc_feature (588): n equals a,t,g, or c
  misc_feature (591): n equals a,t,g, or c
gggaacccgatcctaattcagagaatattgctgcaatctctcagtcttcagtgggttcagacttgtttgtatttaaacctagtgagccaaggccattgtatattcaaaagggtatctccagagagaaagtccagtggggagtgtttgttccacgagatgtccctgaatccttcacctcagaagcttaccagtggctaaatagatcccagttttacttcctaacaaaatcacagagtttattgacattcagtacaaagtctccagaagaaaaactcacaccaacanagcaaacagctgctagcagaagaaagtcttcccacaaccccattttatttcatattgggaaaacacaggcaacagcaggatgaaaaactaaacgaaactttagagaatgagctggtacaactacccttaacagaaaacatacccgcaattagtgagcttcttcacactccacccatgtcctgccatctgctgctttcctgtnctccatgtttgnaaattcattgctgctgtctaaaggagactaagaagtgctaangaaattcctgaaaaatgtagatatgggaagaagnaaaacggaaagtnaanatt

SEQ ID NO: 570 - DNA, 310 bp, Homo sapiens
  misc_feature (274): n equals a,t,g, or c
  misc_feature (286): n equals a,t,g, or c
  misc_feature (288): n equals a,t,g, or c
  misc_feature (290): n equals a,t,g, or c
  misc_feature (305): n equals a,t,g, or c
gcggacgcgtgggaaataattgcattaaaatacaaaaggtgatagggaagaattaaaagatttgcagtattgtacacaaaagctaataattttgtgtactttttatttattttggaggttttatatgatcttcaattgagtattaaataatttgcctagattaagcctaaaatgatgaccagctaattaaagaagatattttgaatctggttctgagctaaagttgagtaaattcttagctaagaaaaaattggaaatccatcatctatattancaacagattctnanantaaattggtaacttntatga

SEQ ID NO: 571 - DNA, 109 bp, Homo sapiens
  misc_feature (46): n equals a,t,g, or c
  misc_feature (64): n equals a,t,g, or c
  misc_feature (94): n equals a,t,g, or c
  misc_feature (97): n equals a,t,g, or c
  misc_feature (108): n equals a,t,g, or c
gggcggttgcggttagtggaccgggaccggtaggggtgctgttganattatggttgacccctanccccggtaccctgaatgatagatcgagganganttaactatagna

SEQ ID NO: 572 - DNA, 429 bp, Homo sapiens
  misc_feature (295): n equals a,t,g, or c
  misc_feature (322): n equals a,t,g, or c
  misc_feature (374): n equals a,t,g, or c
  misc_feature (392): n equals a,t,g, or c
  misc_feature (399): n equals a,t,g, or c
  misc_feature (419): n equals a,t,g, or c
  misc_feature (420): n equals a,t,g, or c
gtgtattttacaatttttttaaaggaaaatttaaaatatgaaatgtttgttttgtcttaacagggtatcccttctccctcccttgtcagccttccttccttctttgaaaggagaagtcatacgttaagtagatctacaactcatttgatatgaagcgttaccaaaatcttaaattatagaaatgtatagacacctcatactcaaataagaaactgacttaaatggtacttgtaattagcacttggtgaaagctggaaggaagataaataacactaaactatgctatttgattttncttcttgaaagagtaaggtttacctgntacattttcaagttaattcatgtaaaaaatgatagtgattttgatgtaattnatctcttgatcgaatctngcattcnaaaggccaataatttaaagnnggctatcaa

SEQ ID NO: 573 - DNA, 202 bp, Homo sapiens
  misc_feature (33): n equals a,t,g, or c
  misc_feature (45): n equals a,t,g, or c
  misc_feature (152): n equals a,t,g, or c
  misc_feature (158): n equals a,t,g, or c
  misc_feature (173): n equals a,t,g, or c
  misc_feature (189): n equals a,t,g, or c
  misc_feature (194): n equals a,t,g, or c
gggctggggctgaccgaggaggtggagggtggnagaggctggggntgataaatctattgattgattgtgatagtaaaaaaaaaaaaaaaaaaaaaaaaaaaaaaaaaaaaaaaaaaaaaaaaaaaaaaaaaaaaaaaaaaaaaaaaaaaaanaaaaanaaaaaaaaaaaaaanaaaaaaaaaaaaaaanaaatntaatatgc

SEQ ID NO: 574 - DNA, 229 bp, Homo sapiens
  misc_feature (30): n equals a,t,g, or c
  misc_feature (53): n equals a,t,g, or c
  misc_feature (72): n equals a,t,g, or c
  misc_feature (148): n equals a,t,g, or c
  misc_feature (163): n equals a,t,g, or c
  misc_feature (172): n equals a,t,g, or c
  misc_feature (191): n equals a,t,g, or c
  misc_feature (220): n equals a,t,g, or c
gcccacgcgtccgtctagatcgcgagcggncgccctttttttttttttttcanaagagctacattgtgtcantggacatttttaaaaactgtgatttttaataatgtccaatgactgcaagtcggcctggattttcacttgcaaaggntacagctgcattgtnaggtctccnagccctgcagagagctccntccactggttagcagtgtgttgtgttttncattcattt

SEQ ID NO: 575 - DNA, 260 bp, Homo sapiens
  misc_feature (196): n equals a,t,g, or c
  misc_feature (215): n equals a,t,g, or c
  misc_feature (217): n equals a,t,g, or c
  misc_feature (250): n equals a,t,g, or c
  misc_feature (257): n equals a,t,g, or c
gaaaagcttaaagaaggttttactgatccagatgttgtccagagacttcgagccttgagggttcttggtgctgatgttggtgaaggtgtgcgcggggatcagtaaaagcttaaagaaggttttcacaggtcactgggctgtggtgagagaaggcctcacgaacccttggattccggataactggtcttggggcggngtggcttctgaacactgcnantgctaccgagttctacactgaaaaggactggancaagaangac

SEQ ID NO: 576 - DNA, 263 bp, Homo sapiens
  misc_feature (208): n equals a,t,g, or c
  misc_feature (212): n equals a,t,g, or c
  misc_feature (233): n equals a,t,g, or c
  misc_feature (251): n equals a,t,g, or c
  misc_feature (255): n equals a,t,g, or c
ggttttgtccttgtgttaggcagtctgagcagcgagtgatccagagcgcagccaacaaagcagcagatagcagtgtacagaaagcaaaaaaggaactgtatgtgaggcacttgtttctgttaatatccatattcctgttaacacacaccctttctcatgtaaaaagaaaaataaataaatggtctgaactttgaaaactttgtgctgntaancatagattttggagacaaatnaatagatgctatgctgtntcantttcatag

SEQ ID NO: 577 - DNA, 366 bp, Homo sapiens
  misc_feature (297): n equals a,t,g, or c
  misc_feature (361): n equals a,t,g, or c
  misc_feature (364): n equals a,t,g, or c
  misc_feature (365): n equals a,t,g, or c
  misc_feature (366): n equals a,t,g, or c
gaggaaacactgtctatgataggatttccaaaagtatttgtggacagttaaatgctaattaatatacatctgtagttattctacattttcttgaaatttgggaggttaataccaagtattcatttcatgatgtaaagaaactgaacagtgaagtggcttgattgcttaaactattgacttggtaagtctactgtatataacatctaatatatatattacaggccaaatgaactaaacattgccttgctatattcaccaaaaggacttaattcttgtttttttcccagttttatatanaggaaacactatgataggatttcctaaagtatttgtggacagttaaatgctaattatatacatntgnnn

SEQ ID NO: 578 - DNA, 595 bp, Homo sapiens
  misc_feature (4): n equals a,t,g, or c
  misc_feature (5): n equals a,t,g, or c
  misc_feature (14): n equals a,t,g, or c
  misc_feature (158): n equals a,t,g, or c
  misc_feature (212): n equals a,t,g, or c
  misc_feature (376): n equals a,t,g, or c
  misc_feature (414): n equals a,t,g, or c
  misc_feature (419): n equals a,t,g, or c
  misc_feature (483): n equals a,t,g, or c
  misc_feature (564): n equals a,t,g, or c
  misc_feature (565): n equals a,t,g, or c
  misc_feature (570): n equals a,t,g, or c
  misc_feature (572): n equals a,t,g, or c
  misc_feature (576): n equals a,t,g, or c
gganngctggattnggcccaggcaaagaccagcaggaagaagaaatttgggaaaaaaaacaaggaccagggaggtgagtactgagggccagggaagaggagtaggggtgtctcagggtgatctctggcccaccgccttggccccttctcccaggtctnacccaggcacagtacattgactgcttccagaagatcaagtacagcttcaacctnctggtaggtggctccccacaagttcaccaggcctctcctcttccccttcctccccagtaatcctctgctgtctggactcaaccatcccaagcctttttcttcttcatctactccccctagaacctccccttccctcttgggacttttgggaagtgccagccttncagccaaggcataaaacaattatggtgacctggtgaanatggngtggtgtgaagggtggtgacaggcattgctctttgtccccaagggaaaggctggcccacctggnttgaaggagacaagtgccccctgagctcgtacacattcctctttaagtcccttgaactttcgtgaagttaagggacgacannggtgntnaaanacggacaggcttgaagtca

SEQ ID NO: 579 - DNA, 132 bp, Homo sapiens
  misc_feature (2): n equals a,t,g, or c
  misc_feature (17): n equals a,t,g, or c
  misc_feature (64): n equals a,t,g, or c
  misc_feature (77): n equals a,t,g, or c
  misc_feature (79): n equals a,t,g, or c
  misc_feature (110): n equals a,t,g, or c
  misc_feature (115): n equals a,t,g, or c
cnaccttctaagagatntaatgggtcactatgtgtggttattctacattaagcctacaacattnttcagggttggananatgaactaatactggtgaaaatttacctaanacctnggttatcaaaaacatct

SEQ ID NO: 580 - DNA, 558 bp, Homo sapiens
  misc_feature (1): n equals a,t,g, or c
  misc_feature (9): n equals a,t,g, or c
  misc_feature (14): n equals a,t,g, or c
  misc_feature (42): n equals a,t,g, or c
  misc_feature (236): n equals a,t,g, or c
  misc_feature (269): n equals a,t,g, or c
  misc_feature (353): n equals a,t,g, or c
  misc_feature (370): n equals a,t,g, or c
  misc_feature (374): n equals a,t,g, or c
  misc_feature (410): n equals a,t,g, or c
  misc_feature (411): n equals a,t,g, or c
  misc_feature (428): n equals a,t,g, or c
  misc_feature (507): n equals a,t,g, or c
  misc_feature (529): n equals a,t,g, or c
  misc_feature (543): n equals a,t,g, or c
  misc_feature (547): n equals a,t,g, or c
  misc_feature (553): n equals a,t,g, or c
ntcggaatnaaccntcacttaagggaacaaaagctggaggangcgcgcctgcaggtcgacactagtggatccaaagaattcggcacgaggccgcgttgaccactggcgtctcgctggtggtcttcgagaccggcgttggttgaaaatcgcccccggctttggccgtggccgcgggtgagattcggcgcccagagcccccgggggcctcagctcaccgcgcgctgccccatgtgcgncggtgaaacccaggccccgacaggcgctgccgncttcccccccgggtgcggttcgttcgcgaggtgttggcccctgattccttgaccccgattgcagacccttaaccttgttctttnttccgcagacaatggtncttncccacggctgtacaaccgacggtcggccaaggaccnnggggttttggggggaantttggtttttcccaaggtttttcaaattaaagttgtttttgttttaaaaaaaaaaaaaaaaaaaaaattgggggggtantttttggggggggcccgggggncccatggttttttncaanccgggnggggt

SEQ ID NO: 581 - DNA, 120 bp, Homo sapiens
  misc_feature (62): n equals a,t,g, or c
  misc_feature (65): n equals a,t,g, or c
  misc_feature (70): n equals a,t,g, or c
  misc_feature (99): n equals a,t,g, or c
  misc_feature (103): n equals a,t,g, or c
ggggacccggcccaattcccgggtcgaccacgcgtccgcacgattggaagaagaagcttttnccnttggnctaattcgcactttcctcacgaggaaatnaaantagggcaaaaaccaaac

SEQ ID NO: 582 - DNA, 260 bp, Homo sapiens
  misc_feature (5): n equals a,t,g, or c
  misc_feature (211): n equals a,t,g, or c
  misc_feature (240): n equals a,t,g, or c
  misc_feature (245): n equals a,t,g, or c
  misc_feature (259): n equals a,t,g, or c
  misc_feature (260): n equals a,t,g, or c
ggcanagctcagaatgcttatttccaattaaaacgcctacagctgcctcctagaatatagactgtctgtattattattcacctataattagtcattatgaatgctttaaagctgtacttgcatttcaaagcttattaagatataaatggagattttaaagtagaaataaatatgtattccatgtttttaaaaaaaaaaaaaaaaaaaaaanccccggggggggccccggtccccatttgncccantggggggccgtttnn

SEQ ID NO: 583 - DNA, 469 bp, Homo sapiens
  misc_feature (162): n equals a,t,g, or c
  misc_feature (423): n equals a,t,g, or c
  misc_feature (460): n equals a,t,g, or c
gggaggcccccggcgcccccccggtgtccccgcgaggggcccggggcggggtccgccggccctgcgggccgccggtgaaataccactactctgatcgttttttcactgacccggtgaggcgggggggcgagccccgaggggctctcgcttctggcgccaagngcccggccgcgcgccggccgggcgcgacccgctccggggacagtgccaggtggggagtttgactggggcggtacacctgtcaaacggtaacgcaggtgtcctaaggcgagctcagggaggacagaaacctcccgtggagcagaagggcaaaagctcgcttgatcttgattttcagtacgaatacagaccgtgaaagcggggcctcacgatccttctgaccttttgggttttaagcaggaggtgtcagaaaagttaccacanggataactggcttgtggcggccaaacgttatagcgangtcgctttt

SEQ ID NO: 584 - DNA, 361 bp, Homo sapiens
  misc_feature (253): n equals a,t,g, or c
  misc_feature (265): n equals a,t,g, or c
ggttagttttaccctactgatgatgtgttgttgccatggtaatcctgctcagtacgagaagaaccgcagttcagacatttggtgtatgtgcttggctgaggagccaatggggcgaactaccatctgtgggattatgactgaacgcctctaagtcagaatcccgcccaggcggaacgatacggcagcgccgcggagcctcggttggcctcggatagccggtcccccgcctgtccccgccggcgggccgcccccncctccacgcgcnccgcgcgcgcgggagggcgcgtgccccgccgcgcgccgggaccggggtccggtgcggagtgcccttcgtcctgggaaacggggcgcggccggaaag

SEQ ID NO: 585 - DNA, 482 bp, Homo sapiens
  misc_feature (32): n equals a,t,g, or c
  misc_feature (148): n equals a,t,g, or c
  misc_feature (165): n equals a,t,g, or c
  misc_feature (169): n equals a,t,g, or c
  misc_feature (176): n equals a,t,g, or c
  misc_feature (203): n equals a,t,g, or c
  misc_feature (207): n equals a,t,g, or c
  misc_feature (224): n equals a,t,g, or c
  misc_feature (236): n equals a,t,g, or c
  misc_feature (275): n equals a,t,g, or c
  misc_feature (319): n equals a,t,g, or c
  misc_feature (363): n equals a,t,g, or c
  misc_feature (370): n equals a,t,g, or c
  misc_feature (380): n equals a,t,g, or c
  misc_feature (405): n equals a,t,g, or c
  misc_feature (426): n equals a,t,g, or c
  misc_feature (441): n equals a,t,g, or c
  misc_feature (445): n equals a,t,g, or c
  misc_feature (450): n equals a,t,g, or c
ggtacctaacaaacccacaggtcctaaactancaaacctgcattaaaaatttcggttggggcgacctcggagcagaacccaacctccgagcagtacatgctaagacttcaccagtcaaagcgaactactatactcaattgatccaatnacttgaccaacggaacnagtnaccctanggataacagcgcaatcctattctatantccntatcaacaatagggttnacgacctcgatnttggatcaggacatcccgatggtgcagccgctataaaangttcgtttgttcaaccattaaagtcctacgtgatctgaattcanaccggagtaatccaggtcggtttctatctacttcaaattcctcnctgtacnacaggacatnaagatataaggcctacttctcaaancgccttcccccgtaaatgatntcatctcaacttaantatnatacncacaccctcccaataaaagggtctgttgggtt

SEQ ID NO: 586 - DNA, 492 bp, Homo sapiens
  misc_feature (5): n equals a,t,g, or c
  misc_feature (11): n equals a,t,g, or c
  misc_feature (15): n equals a,t,g, or c
  misc_feature (19): n equals a,t,g, or c
  misc_feature (79): n equals a,t,g, or c
  misc_feature (447): n equals a,t,g, or c
  misc_feature (458): n equals a,t,g, or c
  misc_feature (463): n equals a,t,g, or c
  misc_feature (480): n equals a,t,g, or c
  misc_feature (491): n equals a,t,g, or c
ccganttctanattnaggnacacctgccggtaccgggtccggaattcccgggtcgacccacgcgtccggtcctttcccnttccccccccccacgcctcctcccctcctcccgcccacgccccgctccccgcccccggagccccgcggacgctacgccgcgacgagtaggagggccgctgcggtgagccttgaagcctagggcgcgggcccgggtggagccgccgcaggtgcagatcttggtggtagtagcaaatattcaaacgagaactttgaaggccgaagtggagaagggttccatgtgaacagcagttgaacatgggtcagtcggtcctgagagatgggcgagcgccgttccgaagggacgggcgatggcctccgttgccctcggccgatcgaaagggagtcgggttcagatccccgaatccggagtggcggagatggcgccgngaggcgtcagngcggnaacgcgaccgatcccgnagaagcccggng

SEQ ID NO: 587 - DNA, 248 bp, Homo sapiens
  misc_feature (65): n equals a,t,g, or c
  misc_feature (122): n equals a,t,g, or c
  misc_feature (124): n equals a,t,g, or c
  misc_feature (205): n equals a,t,g, or c
  misc_feature (210): n equals a,t,g, or c
  misc_feature (211): n equals a,t,g, or c
  misc_feature (220): n equals a,t,g, or c
  misc_feature (242): n equals a,t,g, or c
ccacgcgtccggttaacaacaagaaaggtgtaattagaattgggatgtggatatttactgtatgnacaacacatttacagttctgtaatgcaaggatgcagtttaaaaatgtgaagtagtgnanggtttttgaaaataagctttaaaatatagggatcttgaaaggcccccgggggtactattttataacttagaataaatgggnaatcnnaactgtgtntttggtaaattaattttttaantatttt

SEQ ID NO: 588 - DNA, 653 bp, Homo sapiens
  misc_feature (1): n equals a,t,g, or c
  misc_feature (2): n equals a,t,g, or c
  misc_feature (3): n equals a,t,g, or c
  misc_feature (11): n equals a,t,g, or c
  misc_feature (24): n equals a,t,g, or c
  misc_feature (475): n equals a,t,g, or c
  misc_feature (510): n equals a,t,g, or c
  misc_feature (544): n equals a,t,g, or c
  misc_feature (575): n equals a,t,g, or c
  misc_feature (578): n equals a,t,g, or c
  misc_feature (604): n equals a,t,g, or c
  misc_feature (626): n equals a,t,g, or c
  misc_feature (653): n equals a,t,g, or c
nnncttcctantggaaattcccgngacactattgaaggtacgcctgcaggtaccggtccggaattcccgggtcgacccacgcgtccgcggacgcgtggggactgcttagaaatatagctgaagtgatcaccacagccataaaattgtttaagaaagatttatataatgtttacaaatctggaatcaaggattttagctgaaatcctttaagagatattagagcaagtatttaattcaggtattttcaagttttaaaacttaacctgtttacctactaaaaataaaatagctagtttttttctgcatataaaagttcattgaaatgatatgcccttatttgcaatacttttcccataaagttttaagtgtgaaagaattgtaatttactagatatgtttggtatgggatattttgttaggcaagttttcttttttcttcttaaattgcaataggcttccaaaaagagtataattgnttcagaacaaattaactcttggcattatacgtctncctttttctttacagtattagtaaaatgaaaaantggacactttctgatttaacttcactaatgnaantactctctcaaggaagcttttaaaanttaaattaccatcacacaaccnttttatagtaaggcaacatttggtttn

SEQ ID NO: 589 - DNA, 625 bp, Homo sapiens
  misc_feature (3): n equals a,t,g, or c
  misc_feature (364): n equals a,t,g, or c
  misc_feature (375): n equals a,t,g, or c
  misc_feature (398): n equals a,t,g, or c
  misc_feature (400): n equals a,t,g, or c
  misc_feature (521): n equals a,t,g, or c
  misc_feature (522): n equals a,t,g, or c
  misc_feature (525): n equals a,t,g, or c
  misc_feature (560): n equals a,t,g, or c
  misc_feature (562): n equals a,t,g, or c
  misc_feature (563): n equals a,t,g, or c
  misc_feature (603): n equals a,t,g, or c
  misc_feature (618): n equals a,t,g, or c
gcngaaacctcccgtggagcagaagggcaaaagctcgcttgatcttgattttcagtacgaatacagaccgtgaaagcggggcctcacgatccttctgaccttttgggttttaagcaggaggtgtcagaaaagttaccacagggataactggcttgcggcggccaagcgttcatagcgacgtcgctttttgatccttcgatgtcggctcttcctatcattgtgaagcagaattcaccaagcgttggattgttcacccacacgagccctgtgcttttggtgtaaataatgtacaatttgtggatgtcattgaatctagaggactttcccctttttatatttgtattaactttaacttattaaaaanaaaaaaagaanaagaaaaacaatttataaaaaananaaaaagcaaccaaccccaacaacaaaaaagaatggtttggtattggagaagggatggtcagttaagcctgctggcacacgacggaatggatctgggcccggggaccactttcatactacgnnctnatctttggatacccagggaggggcaaccgtttcgntnngggctgtacccagaaggtggaacggagtttggacagactntccattaggcgtggntctttat

SEQ ID NO: 590 - DNA, 365 bp, Homo sapiens
  misc_feature (71): n equals a,t,g, or c
  misc_feature (177): n equals a,t,g, or c
  misc_feature (205): n equals a,t,g, or c
  misc_feature (264): n equals a,t,g, or c
  misc_feature (300): n equals a,t,g, or c
  misc_feature (305): n equals a,t,g, or c
  misc_feature (341): n equals a,t,g, or c
  misc_feature (346): n equals a,t,g, or c
  misc_feature (349): n equals a,t,g, or c
ggcagagttttcaaaaccaagtgcacaaacgtttattaagcatttaggaaatattatgtaaagaacctctnatccttgcatgccaggcactctttcaatcacttcagtgaccatttttccaaaattctgaaacatccacacttagggttttctttgaatttgggggtgccctccccncacccggcagccttctgtgtcagggggntacggtcttgatatagacaccattttttggacctaggggcagttttgggattctagctncaggggtacctgggtcttaagggcaaggtttggganccggnactttttgcaaaacgtgggggcagtttcaattttgnccctnaangaggccctagacggga

SEQ ID NO: 591 - DNA, 65 bp, Homo sapiens
  misc_feature (48): n equals a,t,g, or c
  misc_feature (53): n equals a,t,g, or c
  misc_feature (55): n equals a,t,g, or c
  misc_feature (56): n equals a,t,g, or c
  misc_feature (57): n equals a,t,g, or c
gccctatagtgagtcgtattacaattcactggccgtcgttttacaacntcgtnannnggaaaacc

SEQ ID NO: 592 - DNA, 269 bp, Homo sapiens
  misc_feature (8): n equals a,t,g, or c
  misc_feature (28): n equals a,t,g, or c
  misc_feature (96): n equals a,t,g, or c
  misc_feature (123): n equals a,t,g, or c
  misc_feature (127): n equals a,t,g, or c
  misc_feature (129): n equals a,t,g, or c
  misc_feature (132): n equals a,t,g, or c
  misc_feature (134): n equals a,t,g, or c
  misc_feature (138): n equals a,t,g, or c
  misc_feature (152): n equals a,t,g, or c
  misc_feature (161): n equals a,t,g, or c
  misc_feature (198): n equals a,t,g, or c
  misc_feature (212): n equals a,t,g, or c
  misc_feature (221): n equals a,t,g, or c
  misc_feature (234): n equals a,t,g, or c
  misc_feature (252): n equals a,t,g, or c
  misc_feature (256): n equals a,t,g, or c
  misc_feature (267): n equals a,t,g, or c
ggcagagngtgaaggctagacccggttnactggaattcccctggcgatcaaggggtcctagtacaccgcaatcatgtctataatgtcctataacgnaggggccgtaatggccatgaaaggggnaagnanctntntggnccatcgctgcaganaggcgcttngggaatccaggcccagaatggtgaaccacgggacttncagaaagatctttncccatgggntgaaccggttgtnaatgggtttgggccgggnttgncaattaaggtnca

SEQ ID NO: 593 - DNA, 307 bp, Homo sapiens
  misc_feature (8): n equals a,t,g, or c
  misc_feature (160): n equals a,t,g, or c
  misc_feature (172): n equals a,t,g, or c
  misc_feature (267): n equals a,t,g, or c
  misc_feature (268): n equals a,t,g, or c
  misc_feature (278): n equals a,t,g, or c
  misc_feature (282): n equals a,t,g, or c
  misc_feature (302): n equals a,t,g, or c
ggcagagnagcattctctaactctaccccaccctacaaaatgcatatggaggtaggctgaaaagaatgtaatttttattttctgaaatacagatttgagctatcagaccaacaaaccttccccctggaaaagtgagcagcaacgtaaaaacgtatgtganagcctctcttgnaatttctagttagcaatcttaaggctctttaaggttttctccaatattaaaaaatatcaccaaagaagtcctgctatgttaaaaacaaacaacannaaacaaacancagnaaaaaatttaaaaaaaaaancgggg

SEQ ID NO: 594 - DNA, 128 bp, Homo sapiens
  misc_feature (48): n equals a,t,g, or c
  misc_feature (72): n equals a,t,g, or c
  misc_feature (94): n equals a,t,g, or c
  misc_feature (123): n equals a,t,g, or c
  misc_feature (124): n equals a,t,g, or c
tatccacactgtcaaacaggttggtgtgggttcattggcattctttgnaatactgcttaattgctgataccntatgaatgaaacatgggctgtnattactgcaatcactgtgcctatcggcanntaat

SEQ ID NO: 595 - DNA, 598 bp, Homo sapiens
  misc_feature (214): n equals a,t,g, or c
  misc_feature (234): n equals a,t,g, or c
  misc_feature (236): n equals a,t,g, or c
  misc_feature (252): n equals a,t,g, or c
  misc_feature (279): n equals a,t,g, or c
  misc_feature (303): n equals a,t,g, or c
  misc_feature (306): n equals a,t,g, or c
  misc_feature (328): n equals a,t,g, or c
  misc_feature (361): n equals a,t,g, or c
  misc_feature (367): n equals a,t,g, or c
  misc_feature (384): n equals a,t,g, or c
  misc_feature (391): n equals a,t,g, or c
  misc_feature (407): n equals a,t,g, or c
  misc_feature (426): n equals a,t,g, or c
  misc_feature (552): n equals a,t,g, or c
  misc_feature (560): n equals a,t,g, or c
  misc_feature (562): n equals a,t,g, or c
  misc_feature (591): n equals a,t,g, or c
  misc_feature (593): n equals a,t,g, or c
gtggtttttggctctttcagagaggtctcaggttctttccatgcagactcctcagatctgaacacagtttagtgctttacatgctgtgctctttgaagagatttcaacaagaatattgtatgttaaagcatcagagatggtaatctacagctcacctctgaaggcaaatataagctgggaaaaaagttttgatgaaattcttgaagttcatggngatcagtgcaattgaccttntncctcactcctgccagntgaaaatggatttttaaattatactgnagctgatgaaactcctgattttgnagntaatttattaagtctgggatgnagaacttcaagaagtaagagctaagttctaagntcatgnttggaaattaatacttnatttggngctgggctattttgantttgggggggaatcagcantattcttcagaaggggacctggtttcttcaagggaaagaaacactcttattccaaactacagaataatggggtaaacatgctaaataggtctataaggaaaccaaatactggattatctcggaggntattggtnanaagggccttgggtaaaaataagggtaaananaaagg

SEQ ID NO: 596 - DNA, 465 bp, Homo sapiens
  misc_feature (11): n equals a,t,g, or c
  misc_feature (423): n equals a,t,g, or c
  misc_feature (438): n equals a,t,g, or c
  misc_feature (465): n equals a,t,g, or c
gaaaaaaaatncattgtaaataacctcagctgggatgaggagtgacagaatatcaaaataatttgtggctgtggatttttttaactgctagtagtggaatactggaaaagcttcatttctgaagatgaattttatttttaaaaaatacatgcacactcaaaacttttagctttgatcacaagtggacaaatttctgaaaccaaaggcaactaagttgctgtgttagctcttgctggattttgagcctaggtcctactgtctgccagtactcatgtgagttgtatgtgcccccagtgctacatacgcaggtatgcgtaagtgtgtatgcttgttttaaacaaacactcaacgtacatatgtacataatctacacatatttatatcacatatctagctttattactatagactatacgaattggnggtaacatgaaatgntaccttttacagactgtttttaaaaan

SEQ ID NO: 597 - DNA, 320 bp, Homo sapiens
  misc_feature (45): n equals a,t,g, or c
  misc_feature (98): n equals a,t,g, or c
  misc_feature (104): n equals a,t,g, or c
  misc_feature (105): n equals a,t,g, or c
  misc_feature (123): n equals a,t,g, or c
  misc_feature (132): n equals a,t,g, or c
  misc_feature (147): n equals a,t,g, or c
  misc_feature (159): n equals a,t,g, or c
  misc_feature (175): n equals a,t,g, or c
  misc_feature (187): n equals a,t,g, or c
  misc_feature (236): n equals a,t,g, or c
  misc_feature (240): n equals a,t,g, or c
  misc_feature (259): n equals a,t,g, or c
  misc_feature (313): n equals a,t,g, or c
  misc_feature (319): n equals a,t,g, or c
gcacgagcataccttctggttgcttcaaacctgacaccgtccctnagtgaatacgtacagccaaaaaggaccaactggcttctgtgcactagcctgtnaattannttgcttagtatggttctnagatcttgnacagtatatttaaanctgtaaatatgnttgtgccttaaaaggngagaagaaagtntagatagttaaaagactgcagctgctggaagttctgagccgggcaagtngtgnggggctgttgggacacttncttgtggggcccggggtaatcagggcagcctttcatagggcggggtccatgtgntggcant

SEQ ID NO: 598 - DNA, 688 bp, Homo sapiens
  misc_feature (343): n equals a,t,g, or c
  misc_feature (471): n equals a,t,g, or c
  misc_feature (507): n equals a,t,g, or c
  misc_feature (582): n equals a,t,g, or c
  misc_feature (584): n equals a,t,g, or c
  misc_feature (604): n equals a,t,g, or c
  misc_feature (637): n equals a,t,g, or c
  misc_feature (642): n equals a,t,g, or c
  misc_feature (650): n equals a,t,g, or c
  misc_feature (673): n equals a,t,g, or c
gcccaaacccactccaccttactaccagacaaccttagccaaaccatttacccaaataaagtataggcgatagaaattgaaacctggcgcaatagatatagtaccgcaagggaaagatgaaaaattataaccaagcataatatagcaaggactaacccctataccttctgcataatgaattaactagaaataactttgcaaggagagccaaagctaagacccccgaaaccagacgagctacctaagaacagctaaaagagcacacccgtctatgtagcaaaatagtgggaagatttataggtagaggcgacaaacctaccgagcctggtgatagctggttgtncaagatagaatcttagttcaactttaaatttgcccacagaaccctctaaatccccttgtaaatttaactgttagtccaaagaggaacagctctttggacactaggaaaaaacctttgtagagagagtnaaaaatttaacaccccatagtaggcctaaaagcagncaccaattaaagaaagcgttcaagcttcaacacccacttcctaaaaaattccaaacatataactggaacttcctnanacccaattgggaccaatttntcacccctattagaaagaaactaatggttagtnttaangtaaccantgaaaaacatttttccttccggnattaaagccctggcg

SEQ ID NO: 599 - DNA, 748 bp, Homo sapiens
  misc_feature (543): n equals a,t,g, or c
  misc_feature (613): n equals a,t,g, or c
  misc_feature (657): n equals a,t,g, or c
  misc_feature (707): n equals a,t,g, or c
  misc_feature (727): n equals a,t,g, or c
gctccaccttactaccagacaaccttagccaaaccatttacccaaataaagtataggcgatagaaattgaaacctggcgcaatagatatagtaccgcaagggaaagatgaaaaattataaccaagcataatatagcaaggactaacccctataccttctgcataatgaattaactagaaataactttgcaaggagagccaaagctaagacccccgaaaccagacgagctacctaagaacagctaaaagagcacacccgtctatgtagcaaaatagtgggaagatttataggtagaggcgacaaacctaccgagcctggtgatagctggttgtccaagatagaatcttagttcaactttaaatttgcccacagaaccctctaaatccccttgtaaatttaactgttagtccaaagaggaacagctctttggacactaggaaaaaaccttgtagagagagtaaaaaatttaacacccatagtaggcctaaaagcagccaccaattaagaaagcgttcaagctcaacacccactacctaaaaaatnccaaacatataactgactccttacacccaaattggacccaatctatcacccctatagaaagaactaatgntagtattaagtaaccatgaaaaaccattcttcctccggattaanccctgcgtcaggattaaaacccctgaactggccatttaacaggcccaatntcttaccattcaacccaccnaggtcattattacccttactt

SEQ ID NO: 600 - DNA, 253 bp, Homo sapiens
  misc_feature (80): n equals a,t,g, or c
  misc_feature (85): n equals a,t,g, or c
  misc_feature (91): n equals a,t,g, or c
  misc_feature (94): n equals a,t,g, or c
  misc_feature (193): n equals a,t,g, or c
  misc_feature (197): n equals a,t,g, or c
  misc_feature (204): n equals a,t,g, or c
  misc_feature (250): n equals a,t,g, or c
  misc_feature (251): n equals a,t,g, or c
cctgaccacacgctggggcatcaacaaatgatcacttgacttaatctgcccctatgaacgccccgggaaaaaccgcttgnatgcnccaaanctngtggaactttgccccagcagtgatgcctgccaggaaagggttgaaccgcgaaccttgacgaagggggggcccggttacccaattgcggccctatagtgnagtngtgattnacaattgcactgggccgtcgtttttgacaagttcgtgatgtttggnnat

SEQ ID NO: 601 - DNA, 524 bp, Homo sapiens
  misc_feature (41): n equals a,t,g, or c
  misc_feature (280): n equals a,t,g, or c
  misc_feature (325): n equals a,t,g, or c
  misc_feature (338): n equals a,t,g, or c
  misc_feature (411): n equals a,t,g, or c
  misc_feature (480): n equals a,t,g, or c
  misc_feature (494): n equals a,t,g, or c
  misc_feature (500): n equals a,t,g, or c
  misc_feature (507): n equals a,t,g, or c
  misc_feature (524): n equals a,t,g, or c
ggcacgagcggaagatccccacatcgatgaaagcaaagcgnagcaccaagccatcatcatgtccacgtcgctacgagtcagcccatccatccatggctaccacttcgacacagcctctcgtaagaaagccgtgggcaacatctttgaaaacacagaccaagaatcactagaaaggctcttcagaaactctggagacaagaaagcagaggagagagccaagatcatttttgccatagatcaagatgtggaggagaaaacgcgtgccctgatggccttgaangaagaggacaaaagacaagcttttccatttctgaaactgcggaanttttccttcaaanttcattgaagagaagaggttggttaaggacgttttccaggattggacattcaaagaccagtgggtttttgggnttttacagttgcagctttgtttttaccttacagtttttttttttcaggttccaggtttgaagggcccgnttgaaaggcccggnttacanttgtttnaaggttcccacattttn

SEQ ID NO: 602 - DNA, 397 bp, Homo sapiens
  misc_feature (309): n equals a,t,g, or c
  misc_feature (343): n equals a,t,g, or c
  misc_feature (363): n equals a,t,g, or c
  misc_feature (379): n equals a,t,g, or c
  misc_feature (386): n equals a,t,g, or c
ggcacgagctacgcgggccacgctgctggctggcctgacctaggcgcgcggggtcgggcggccgcgcgggcgggctgagtgagcaagacaagacactcaagaagagcgagctgcgcctgggtcccggccaggcttgcacgcagaggcgggcggcagacggtgcccggcggaatctcctgagctccgccgcccagctctggtgccagcgcccagtggccgccgcttcgaaagtgactggtgcctcgccgcctcctcttcggtgcgggaccatgaagtgctgccgtcggtggtgctgaaactctttctggnttcattctcttcggcactggttactggcgaaaancctggaaacggctttcgganaaggctaactgctggnaacaagnaaaccggaacc

SEQ ID NO: 603 - DNA, 76 bp, Homo sapiens
  misc_feature (32): n equals a,t,g, or c
  misc_feature (45): n equals a,t,g, or c
  misc_feature (55): n equals a,t,g, or c
  misc_feature (59): n equals a,t,g, or c
  misc_feature (64): n equals a,t,g, or c
tcgacccacgcgtccgcccacgcgtccggtgnttagtatccccgncctgtgggcngccncagtntcccctcctaag

SEQ ID NO: 604 - DNA, 127 bp, Homo sapiens
  misc_feature (9): n equals a,t,g, or c
  misc_feature (20): n equals a,t,g, or c
  misc_feature (67): n equals a,t,g, or c
  misc_feature (95): n equals a,t,g, or c
  misc_feature (98): n equals a,t,g, or c
  misc_feature (126): n equals a,t,g, or c
  misc_feature (127): n equals a,t,g, or c
ttttcacgnttaattcactntatttttcttgtataaaaaccctatgttgtagccacagctggagccntagtccgctgcacggagactgtggtgtnggncttgacgaggtgggtcagtgaactcctnn

SEQ ID NO: 605 - DNA, 138 bp, Homo sapiens
  misc_feature (6): n equals a,t,g, or c
  misc_feature (15): n equals a,t,g, or c
  misc_feature (36): n equals a,t,g, or c
  misc_feature (68): n equals a,t,g, or c
  misc_feature (88): n equals a,t,g, or c
  misc_feature (119): n equals a,t,g, or c
  misc_feature (134): n equals a,t,g, or c
  misc_feature (137): n equals a,t,g, or c
tttaanaaaaggggnccctccagcccagtggcggangttctagaactactggatcccccgggttgcangaattcggcacgagaggganccgtgggccgggcgcgccggttcccggcacntgtctcggcacgtgncanc

SEQ ID NO: 606 - DNA, 102 bp, Homo sapiens
  misc_feature (10): n equals a,t,g, or c
  misc_feature (18): n equals a,t,g, or c
  misc_feature (41): n equals a,t,g, or c
  misc_feature (81): n equals a,t,g, or c
  misc_feature (85): n equals a,t,g, or c
ctcttgaaanagacgtgnagctgctcctacccaccactccnggctgagccttgcctgatacagcagcccggaggcaccacncgcnacccgagtctcaccctc

SEQ ID NO: 607 - DNA, 80 bp, Homo sapiens
  misc_feature (45): n equals a,t,g, or c
  misc_feature (56): n equals a,t,g, or c
  misc_feature (61): n equals a,t,g, or c
  misc_feature (72): n equals a,t,g, or c
  misc_feature (78): n equals a,t,g, or c
cacaggcatgctcataaggaaaggttaaaaaaaaaaaaaaaaaantcgaggggggncccgnaaaccaaattngccccnaa

SEQ ID NO: 608 - DNA, 398 bp, Homo sapiens
  misc_feature (132): n equals a,t,g, or c
  misc_feature (137): n equals a,t,g, or c
  misc_feature (138): n equals a,t,g, or c
  misc_feature (139): n equals a,t,g, or c
  misc_feature (360): n equals a,t,g, or c
  misc_feature (373): n equals a,t,g, or c
  misc_feature (377): n equals a,t,g, or c
  misc_feature (386): n equals a,t,g, or c
  misc_feature (394): n equals a,t,g, or c
agacgcggagggtcgccctgagggaagactcttcgggatgacaggagcgggcctcggaagggactcggggcgctggagggaagtttcgttcttcggagaaacagaacgcgctcgagggggcaccgtggggcnaaggnnncactcggttgcggcggcaggagtgagggacagtcccccgatttcctgctccctggggccctggggacgttccggccaccggagcgactgtcacgccgacggggatcaccggcgcgagttggggggtcggaaagcgcctcctcccgccggtcgcggtccgctaaccacttctcgcttgcctgttccgctccttaagagcaactgttgcccttttgaagcagnataagtgtgctgngctngaagcttancgggttgnttgt

SEQ ID NO: 609 - DNA, 275 bp, Homo sapiens
  misc_feature (28): n equals a,t,g, or c
  misc_feature (234): n equals a,t,g, or c
  misc_feature (261): n equals a,t,g, or c
  misc_feature (262): n equals a,t,g, or c
  misc_feature (266): n equals a,t,g, or c
  misc_feature (274): n equals a,t,g, or c
tttttaagtgctccattttaatgccgangaataagtcttttggcaacacaaactggtcaataataggtaatgcaggtatgttcaggttaagccaacaatgttttgcatttttatgcttattttctgtcaacactaatgaagtcaacattgcctgaatgtctgaataatgaaacacatccctgtttaaaagtatgtaactgaaaaaaaaaaaaaaaaaaaaaaaaaaaaaaaaanaaaaaaaaaaaaaaaaaaaaaaaaaanncccncggggggnc

SEQ ID NO: 610 - DNA, 433 bp, Homo sapiens
  misc_feature (329): n equals a,t,g, or c
  misc_feature (358): n equals a,t,g, or c
  misc_feature (391): n equals a,t,g, or c
  misc_feature (396): n equals a,t,g, or c
  misc_feature (422): n equals a,t,g, or c
  misc_feature (429): n equals a,t,g, or c
ggcagagcgcggctctcccacctgtcaccctggcccttctctgcttggatggtgtcttcctctcctcagccgagaatgacttcgtccaccggatccaggaggtggaagaggatggccccagcagctgctcggaggacgattacagtgagctgctgcaggagatcacagacaacctgacgaggaaggagattcagatagagaagatccatttggacacgtcctccttcatggaggagctgcctggagagaaggaccttgcccacgtggtagagatcttatgactttggaaccagcgttcaagacggaggacctgcttggcaacgtttttntgagtttccaagaggaaggggtttcaagnttcaattgggttggatgataattcaaggaattnggcantttttccctgcccgggccttaatttncggaagncctg

SEQ ID NO: 611 - DNA, 497 bp, Homo sapiens
  misc_feature (340): n equals a,t,g, or c
  misc_feature (405): n equals a,t,g, or c
  misc_feature (422): n equals a,t,g, or c
  misc_feature (459): n equals a,t,g, or c
  misc_feature (481): n equals a,t,g, or c
  misc_feature (487): n equals a,t,g, or c
ggcacgagtgggaccccaggcagcagcagcagcggcagctaaagcagcagcaaagttcggtgctggagcagccggagtcctccctggtgttggaggggctggtgttcctggcgtgcctggggcaattcctggaaaaccaccccacactgggaatagccaccttgcccttgtagaatccatccgcccatccgtccattcatccatcggtccgtccatccatgtccccagttgaccgcccggcaccactagctggctgggtgcacccaccatcaacctggttgacctgtcatggccgcctgtgccctgcctccaaccccatcctaaactcccccaaggcgtncggggctgtgcagactggggtgccaagcatcttctccccaaccggggtgttcccacatgcagtantgtataacccccattcnttcctcggtccaatgaacttcagagcagttccattcntgcccggccatcttttgtgtcngctgtnaaaataaata

SEQ ID NO: 612 - DNA, 503 bp, Homo sapiens
  misc_feature (1): n equals a,t,g, or c
  misc_feature (28): n equals a,t,g, or c
  misc_feature (33): n equals a,t,g, or c
  misc_feature (41): n equals a,t,g, or c
  misc_feature (47): n equals a,t,g, or c
  misc_feature (52): n equals a,t,g, or c
  misc_feature (64): n equals a,t,g, or c
  misc_feature (69): n equals a,t,g, or c
  misc_feature (71): n equals a,t,g, or c
  misc_feature (90): n equals a,t,g, or c
  misc_feature (111): n equals a,t,g, or c
  misc_feature (116): n equals a,t,g, or c
  misc_feature (129): n equals a,t,g, or c
  misc_feature (141): n equals a,t,g, or c
  misc_feature (156): n equals a,t,g, or c
  misc_feature (162): n equals a,t,g, or c
  misc_feature (166): n equals a,t,g, or c
  misc_feature (181): n equals a,t,g, or c
  misc_feature (192): n equals a,t,g, or c
  misc_feature (211): n equals a,t,g, or c
  misc_feature (224): n equals a,t,g, or c
  misc_feature (250): n equals a,t,g, or c
  misc_feature (265): n equals a,t,g, or c
  misc_feature (268): n equals a,t,g, or c
  misc_feature (284): n equals a,t,g, or c
  misc_feature (287): n equals a,t,g, or c
  misc_feature (290): n equals a,t,g, or c
  misc_feature (324): n equals a,t,g, or c
  misc_feature (336): n equals a,t,g, or c
  misc_feature (347): n equals a,t,g, or c
  misc_feature (355): n equals a,t,g, or c
  misc_feature (374): n equals a,t,g, or c
  misc_feature (385): n equals a,t,g, or c
  misc_feature (388): n equals a,t,g, or c
  misc_feature (398): n equals a,t,g, or c
  misc_feature (408): n equals a,t,g, or c
  misc_feature (423): n equals a,t,g, or c
  misc_feature (442): n equals a,t,g, or c
  misc_feature (447): n equals a,t,g, or c
  misc_feature (450): n equals a,t,g, or c
  misc_feature (460): n equals a,t,g, or c
  misc_feature (462): n equals a,t,g, or c
  misc_feature (491): n equals a,t,g, or c
  misc_feature (493): n equals a,t,g, or c
  misc_feature (494): n equals a,t,g, or c
  misc_feature (497): n equals a,t,g, or c
  misc_feature (498): n equals a,t,g, or c
naattcggcagagttttttttttttttnaaggntcaaatgngatctnttttnaatataaagatnttttntnaaaatctctgtatgaaatnatctccggggagatagattcnccatntttcccctgaagntttaggggcctntgcctgccactccanaccctntttntgaagggcccaagtnactcactatgnaaagaagtcattccctctngttagtgttaaanccagttatgggtcttcctggaatggnggataatccacacgnggntaaatccaagggttgnttnatntgggttcctccctcccctccccttccaccagggnttccctgacagnggccacagggngacttttnaggggttttaggtcattgnggggatgggtnccnggaaatgggnccagatctgnattgggggccccccntggttgtcccatggggttnttagnggnttttaggggntngtgggggtaaaggggtttttttaacaaantnnttnnccagg

SEQ ID NO: 613 - DNA, 197 bp, Homo sapiens
  misc_feature (15): n equals a,t,g, or c
  misc_feature (39): n equals a,t,g, or c
  misc_feature (44): n equals a,t,g, or c
  misc_feature (45): n equals a,t,g, or c
  misc_feature (90): n equals a,t,g, or c
  misc_feature (120): n equals a,t,g, or c
  misc_feature (152): n equals a,t,g, or c
  misc_feature (165): n equals a,t,g, or c
  misc_feature (181): n equals a,t,g, or c
  misc_feature (185): n equals a,t,g, or c
aaaatctcaagttgntgggcagaaaaactgacagggcantacanngtaacaaacagaatccaagtggggtggcccttgtgcacagagctncaggtgacctctggagagacatgggcattnacatggaaagctaaaacggaagcttaagcttntattactcaacanaaacttctgtgagacnaaangacaagccatgt

SEQ ID NO: 614 - DNA, 435 bp, Homo sapiens
  misc_feature (307): n equals a,t,g, or c
  misc_feature (384): n equals a,t,g, or c
  misc_feature (388): n equals a,t,g, or c
  misc_feature (390): n equals a,t,g, or c
  misc_feature (396): n equals a,t,g, or c
  misc_feature (419): n equals a,t,g, or c
cattttaatcttttataaagttttgaatgttcatgtatgaatgctgcagctgtgaagcatacataaataaatgaagtaagccatactgatttaatttattggatgttattttccctaagacctgaaaatgaacatagtatgctagttatttttcagtgttagccttttactttcctcacacaatttggaatcatataatataggtactttgtccctgattaaataatgtgacggatagaatgcatcaagtgtttattatgaaaagagtggaaaagtatatagctttagccaaaggtgttgcccatcnaagaaatgagcgatatatagaatagtgtgggcattctcctgtaagtggagtgaaggggtgacattctccccactctnccancnggttcnccccatattgaataaaggacgcngagagacttgaaccta

SEQ ID NO: 615 - DNA, 272 bp, Homo sapiens
  misc_feature (7): n equals a,t,g, or c
  misc_feature (18): n equals a,t,g, or c
  misc_feature (33): n equals a,t,g, or c
  misc_feature (64): n equals a,t,g, or c
  misc_feature (94): n equals a,t,g, or c
  misc_feature (141): n equals a,t,g, or c
  misc_feature (143): n equals a,t,g, or c
  misc_feature (145): n equals a,t,g, or c
  misc_feature (151): n equals a,t,g, or c
  misc_feature (162): n equals a,t,g, or c
  misc_feature (193): n equals a,t,g, or c
  misc_feature (194): n equals a,t,g, or c
  misc_feature (228): n equals a,t,g, or c
  misc_feature (253): n equals a,t,g, or c
  misc_feature (267): n equals a,t,g, or c
ggggcangcacgtaagtncgacgcacgtatagngaaagcttgggtacgccgtgcaggtaccggntccgggaattcccggggtcgacccacgcgntccggaataatggaatataatatgtcttcataatataacaacactantncnctaatngtaagattaanttaggcagtcttctaccaaatgtggtaatgnngattgcctcaaaattgtggtccacataatccacnctcatcttgcaaagcgctatttcangcacatcattggantacag

SEQ ID NO: 616 - DNA, 160 bp, Homo sapiens
  misc_feature (37): n equals a,t,g, or c
  misc_feature (47): n equals a,t,g, or c
  misc_feature (53): n equals a,t,g, or c
  misc_feature (75): n equals a,t,g, or c
  misc_feature (83): n equals a,t,g, or c
  misc_feature (110): n equals a,t,g, or c
  misc_feature (134): n equals a,t,g, or c
  misc_feature (148): n equals a,t,g, or c
ggtatggtcccatattaagaggcctgttgtctatganattgtctagnattctngtgcaggtctttgctggttaantcaggacnaacgaggaggcacgtcagtccaccccnctcctctcccattttccgtgttgntcccttgcttaacnggcaaagacctg

SEQ ID NO: 617 - DNA, 205 bp, Homo sapiens
  misc_feature (6): n equals a,t,g, or c
  misc_feature (30): n equals a,t,g, or c
  misc_feature (180): n equals a,t,g, or c
  misc_feature (188): n equals a,t,g, or c
  misc_feature (189): n equals a,t,g, or c
  misc_feature (190): n equals a,t,g, or c
  misc_feature (194): n equals a,t,g, or c
ggactntgtacatttgggagtttttatganaaacttaaatgttattatctgggcttatatctggcctctgctttctcctttaattgtaaagtagaagctataaagcagtatttttcttgacaaaaaaaaaaaaaaaaacaaaaaaaaaaaaaaaaaaggaaaaaaaaaaaaaaaaaaaangggggggnnncccngaaaaaaaaac

SEQ ID NO: 618 - DNA, 450 bp, Homo sapiens
  misc_feature (222): n equals a,t,g, or c
  misc_feature (344): n equals a,t,g, or c
  misc_feature (405): n equals a,t,g, or c
  misc_feature (419): n equals a,t,g, or c
  misc_feature (423): n equals a,t,g, or c
  misc_feature (428): n equals a,t,g, or c
  misc_feature (445): n equals a,t,g, or c
cgacaaagtccttaatgggcccagaaggtgaggggagtccggcaatgaggggtggtagggttagcggccatcgcccagctcgtcttccttctaccagacgctggtgctggaaaagagaagtgtaagaataacttgcgccattaggcccatcggaaaggcccaccaccctttaggaagattactggctgtttatagaaggcccgtgtatatcctatgaagaangctggctctcaacttcccccccagccttttaaaagaaaacatttgctacatcgagccgttctaggtgtaaagaggttgttgacttatgatagagttagaaaatcacacatccttgtaaattncccatttggtttaaaaaaaaaaaaaaaaaactcgaggggggggcccgggtacccaatttgnccctaaaagggagncggnattanaattcactggccggcgntttta

SEQ ID NO: 619 - DNA, 294 bp, Homo sapiens
  misc_feature (122): n equals a,t,g, or c
  misc_feature (183): n equals a,t,g, or c
  misc_feature (279): n equals a,t,g, or c
  misc_feature (283): n equals a,t,g, or c
  misc_feature (285): n equals a,t,g, or c
  misc_feature (289): n equals a,t,g, or c
  misc_feature (290): n equals a,t,g, or c
tacctttgttggtcctttcttccttaagtgccaagtgctgagctaaaggaggataactttttggggaagtcatgctgagggtggtagtgtgaccctgcctgaaaaaagggtctcttaccctnccagccctggctcaactctgaagaaggatcttgctacagaaggagcccttgggctcccttnctctttggatagcagttataaatgcccttgttcccaataaaactgggcagatgggaaaaaaaaaaaaaaaaaaaaaaaaaaaaccccggggggggncccngncccnntttg

SEQ ID NO: 620 - DNA, 127 bp, Homo sapiens
  misc_feature (9): n equals a,t,g, or c
  misc_feature (10): n equals a,t,g, or c
  misc_feature (25): n equals a,t,g, or c
  misc_feature (90): n equals a,t,g, or c
  misc_feature (95): n equals a,t,g, or c
  misc_feature (99): n equals a,t,g, or c
  misc_feature (117): n equals a,t,g, or c
  misc_feature (125): n equals a,t,g, or c
ggcagagcnncagccgcaggcccgncgcccgctgctggcgccgtggcctcctatgactacctggtgatcgggggcggctcgggcgggctngccancgtngtggagagccacaagctnggtggcantt

SEQ ID NO: 621 - DNA, 115 bp, Homo sapiens
  misc_feature (27): n equals a,t,g, or c
  misc_feature (86): n equals a,t,g, or c
  misc_feature (111): n equals a,t,g, or c
  misc_feature (112): n equals a,t,g, or c
  misc_feature (115): n equals a,t,g, or c
ggcacgaggctcagtacagctcagctnagcccagcccagtccaacccagcccagcccagtccaacccagcccagctcagctcagcncagcccagctcagctcagctcagcnnagn

SEQ ID NO: 622 - DNA, 507 bp, Homo sapiens
  misc_feature (300): n equals a,t,g, or c
  misc_feature (358): n equals a,t,g, or c
  misc_feature (380): n equals a,t,g, or c
  misc_feature (451): n equals a,t,g, or c
  misc_feature (466): n equals a,t,g, or c
  misc_feature (485): n equals a,t,g, or c
  misc_feature (504): n equals a,t,g, or c
gaaattaaaaaaacactttttaaagggtgcattgataaaatctgaggttttttggttgtcgtttttttctgtgtacatttttttcctaagtttatggcacagggtagaccttaagtattcctcctccatccttcattcttcaccctccattggatcctcaagttttaatgaattccaattataccttacatcagcaagttaaaaaaagtactttaaaataaagcaaagggagactgttgctcaaccatcaggaaacagttgtcagaagacatcattggttctgtgtttcctacggaaatnagaaacgataaatattgcactgaatgtttgtggtttggagtccctgaataataaagangcaatatatttgcagaaagtcncatagggttttttaatgcagaattttgtcagaagacaatggcgctgcatgtttttctttgaattgcaaatnttcattgctaaagantttttttaagatgggcatnttgctttgaaaaagaaaanatt

SEQ ID NO: 623 - DNA, 340 bp, Homo sapiens
  misc_feature (286): n equals a,t,g, or c
  misc_feature (290): n equals a,t,g, or c
  misc_feature (302): n equals a,t,g, or c
  misc_feature (308): n equals a,t,g, or c
  misc_feature (340): n equals a,t,g, or c
aattcggcagaggtcattaaaaaactagagaattagccatattaaggatttttcttgactgcaaattacttctaaagaatcatcagtgtatagattagaagtgctcattacctgcaacttttaaaaaaaattcagttatagctgcttttgaagaggtttccatttttatttaaattactaatggatcaaagaacaattgtttattttttctctttggttttagatattaatgataaccttgttgggaattttttttccaaagaaaatatttttatgaattgaaatnaatnttgaatgttttncttccntttcatttacctactcttggcagtgttagggn

SEQ ID NO: 624 - DNA, 223 bp, Homo sapiens
  misc_feature (202): n equals a,t,g, or c
  misc_feature (204): n equals a,t,g, or c
  misc_feature (212): n equals a,t,g, or c
  misc_feature (222): n equals a,t,g, or c
  misc_feature (223): n equals a,t,g, or c
ggcacgagctaagttcggcatcaatatggtgacctcccgggagcgggggaccaccaggttgcctggcctgataatgtcctttttaaatggagttcagactattaacatttaatgtaattatcaatatagttggatttaagtgtactgtcttgctatttgtttcctatttatgccaacttttttttaatgtcttttgttcttntngttttctnttctttcctnn

SEQ ID NO: 625 - DNA, 541 bp, Homo sapiens
  misc_feature (265): n equals a,t,g, or c
  misc_feature (337): n equals a,t,g, or c
  misc_feature (398): n equals a,t,g, or c
  misc_feature (442): n equals a,t,g, or c
  misc_feature (456): n equals a,t,g, or c
  misc_feature (468): n equals a,t,g, or c
  misc_feature (482): n equals a,t,g, or c
  misc_feature (491): n equals a,t,g, or c
  misc_feature (495): n equals a,t,g, or c
  misc_feature (502): n equals a,t,g, or c
  misc_feature (507): n equals a,t,g, or c
gttgtaataagtaaatgccttaagagtatttaaaatatgcttccacatttcaaaatataaaatgtaacatgacaagagattttgcgtttgacattgtgtctgggaaggaagggccagaccttggaacctttggaacctgctgtcaacaggtcttacagggctgcttgaaccctcataggcctaggctttggtctaaaaggaacatttaaaaagttgccctgtaaagttatttggtgttcatttgaccaattgcatccccagcttnaaaagcaagaagcatccgtttccctggaattataaagaatttgtttcccacccctaaaatttttacagtttnaaaaacttgggtttcccattgaacattcctccttttttccccagtttcccccaaattcctnttttttatttttttggggaaataaggtttgccccattttttaancctacactactttnggaaatgccccncccctggaatgaanggaaaggtncccnattacgnctttnaggttaattacagttccctccccttccccctgcc

SEQ ID NO: 626 - DNA, 483 bp, Homo sapiens
  misc_feature (231): n equals a,t,g, or c
  misc_feature (342): n equals a,t,g, or c
  misc_feature (344): n equals a,t,g, or c
  misc_feature (355): n equals a,t,g, or c
  misc_feature (371): n equals a,t,g, or c
  misc_feature (385): n equals a,t,g, or c
  misc_feature (451): n equals a,t,g, or c
  misc_feature (479): n equals a,t,g, or c
  misc_feature (480): n equals a,t,g, or c
  misc_feature (481): n equals a,t,g, or c
aacccactccaccttactaccagacaaccttagccaaaccatttacccaaataaagtataggcgatagaaattgaaacctggcgcaatagatatagtaccgcaagggaaagatgaaaaattataaccaagcataacatagcaaggactaacccctataccttctgcataatgaattaactagaaataactttgcaaggagagccaaagctaagacccccgaaaccagacgnagctacctgagaacagctaaaagagcacacccgtctatgttagcaaaataatgggaagatttatagggttgaagcgacaaacctaccgacctgggtgatactggttgtccnanataaatcttanttcactttaaatttgnccacagaacctctnaatcccttgttaatttaatgttatccaaaaaagaacagctcttgggacctaagaaaaaacttgttnaaaaattaaaatttacaccatgtagctnnnac

SEQ ID NO: 627 - DNA, 221 bp, Homo sapiens
  misc_feature (109): n equals a,t,g, or c
  misc_feature (116): n equals a,t,g, or c
  misc_feature (158): n equals a,t,g, or c
  misc_feature (161): n equals a,t,g, or c
  misc_feature (189): n equals a,t,g, or c
  misc_feature (191): n equals a,t,g, or c
  misc_feature (221): n equals a,t,g, or c
actctagcctaggattttgcaaaaagctatttacgtaacactatagaaggtacgcctgcaggtaccggtccggaattcccgggtcgacccacgcgtccggtcttggggnccacganccagactcaggacagagtggactctgcctgtgatggggtggnctncctgctggcccccctccaccagtgcctntngcatatatatatttggtgtgcacaggaagn

SEQ ID NO: 628 - DNA, 122 bp, Homo sapiens
  misc_feature (30): n equals a,t,g, or c
  misc_feature (55): n equals a,t,g, or c
  misc_feature (58): n equals a,t,g, or c
  misc_feature (70): n equals a,t,g, or c
  misc_feature (71): n equals a,t,g, or c
aaggctgaaaaacgcaagaggatattggtngatatcgagctatgaggaaagatcnaanagcatgaaggannagggaaggaagatgagctaagatgaagatgaagaaagaaagatgatgatga

SEQ ID NO: 629 - DNA, 252 bp, Homo sapiens
  misc_feature (6): n equals a,t,g, or c
  misc_feature (12): n equals a,t,g, or c
  misc_feature (17): n equals a,t,g, or c
  misc_feature (40): n equals a,t,g, or c
  misc_feature (60): n equals a,t,g, or c
  misc_feature (140): n equals a,t,g, or c
  misc_feature (169): n equals a,t,g, or c
  misc_feature (174): n equals a,t,g, or c
  misc_feature (175): n equals a,t,g, or c
  misc_feature (182): n equals a,t,g, or c
  misc_feature (243): n equals a,t,g, or c
ctactnatggangtgtngttgccatggtaatcctgctcantacgacatgaaccgcaggtncagacatttggtgtatgtgcttggctgaggagccaatggggcgaagctaccatctgtgggattatgactgaacgcctctnagtcagaatcccgcccaggcggaacgatncggcnncgccgcngatcctcggttggcctctgatatccggtcccccgcctgtccccgccggcggggcgggaccngggtcccgt

SEQ ID NO: 630 - DNA, 619 bp, Homo sapiens
  misc_feature (4): n equals a,t,g, or c
  misc_feature (17): n equals a,t,g, or c
  misc_feature (18): n equals a,t,g, or c
  misc_feature (19): n equals a,t,g, or c
  misc_feature (22): n equals a,t,g, or c
  misc_feature (64): n equals a,t,g, or c
  misc_feature (86): n equals a,t,g, or c
  misc_feature (93): n equals a,t,g, or c
  misc_feature (94): n equals a,t,g, or c
  misc_feature (104): n equals a,t,g, or c
  misc_feature (251): n equals a,t,g, or c
  misc_feature (484): n equals a,t,g, or c
  misc_feature (528): n equals a,t,g, or c
  misc_feature (558): n equals a,t,g, or c
  misc_feature (581): n equals a,t,g, or c
  misc_feature (605): n equals a,t,g, or c
  misc_feature (613): n equals a,t,g, or c
gtcntagtaagattacnnntgnaagcatccccattccagtgagttcaccctctaaatcaccacnatcaaaagggacaagcatcaancacgcannaatgcagctnaaaacgcttagcctagccacacccccacgggaaacagcagtgattaacctttagcaataaacgaaagtttaactaagctatactaaccccagggttggtcaatttcgtgccagccaccgcggtcacacgattaacccaagtcaatanaagccggcgtaaagagtgttttagatcaccccctccccaataaagctaaaactcacctgagttgtaaaaaactccagttgacacaaaatagactacgaaagtggctttaacatatctgaacacacaatagctaagacccaaactgggattagataccccactatgcttagccctaaacctcaacagttaaatcaacaaaactgctcgccacaacactacgagccacagcttanaactcaaaggaactggcggtgcttcatatccctctaaaaagaanctgttctgttatcgataaaccccgatcaanctccccactcttgctcacctatntccaaaaaaaaaaaaaaaactcanggggggcngggtcc

SEQ ID NO: 631 - DNA, 210 bp, Homo sapiens
  misc_feature (3): n equals a,t,g, or c
  misc_feature (5): n equals a,t,g, or c
  misc_feature (16): n equals a,t,g, or c
  misc_feature (42): n equals a,t,g, or c
  misc_feature (46): n equals a,t,g, or c
  misc_feature (49): n equals a,t,g, or c
  misc_feature (53): n equals a,t,g, or c
  misc_feature (63): n equals a,t,g, or c
  misc_feature (64): n equals a,t,g, or c
  misc_feature (80): n equals a,t,g, or c
  misc_feature (102): n equals a,t,g, or c
  misc_feature (130): n equals a,t,g, or c
  misc_feature (136): n equals a,t,g, or c
  misc_feature (162): n equals a,t,g, or c
  misc_feature (165): n equals a,t,g, or c
  misc_feature (206): n equals a,t,g, or c
ggncntaacacccacncaaagagtccccacttaacaataccncccnccnacgncaagaatgcnnaaatccgaatgacccnagttttcctattgagtaaacangatcccagttgtgccccactagcatgangcctgnagttccggtttcatgcatgaaattgnttntggagagttttgtaagttgtaaagccaattactggcttttnacat

SEQ ID NO: 632 - DNA, 359 bp, Homo sapiens
caagctgctgctccaaggcctggccacatgcagacaggaggaagctgagctcgacattaggcctcaaggctgccatctgtcttgtagggcctggccttgtgggcagggggcagtcctgtgccttgtgggccctcagcctctgagggcagagatgctgtcagtgccgcagggtaagggacgagtcttctggaaggctctgccatggacatttgtcctcgggctcagaggccccaccctgccccacacctgcccctaatcactgcagtgtccagcccagtgttgaacagattgtagcgttctgtctcattacgagcaaataaatagactttcattggaaaaaaaaaaaaaaaaaaaaaaag

SEQ ID NO: 633 - DNA, 328 bp, Homo sapiens
  misc_feature (221): n equals a,t,g, or c
  misc_feature (223): n equals a,t,g, or c
  misc_feature (246): n equals a,t,g, or c
  misc_feature (256): n equals a,t,g, or c
  misc_feature (286): n equals a,t,g, or c
  misc_feature (319): n equals a,t,g, or c
  misc_feature (323): n equals a,t,g, or c
cttttgggggataagaaagcctgggaggggcctgtgccaaaaccctctctgcctggggactgggcggtgattccgcttctgcctgggctcctgccatggcccccgagaggggctgacactttagctcccggtgcaggtgagaacccgcccggaggaagaaggaaggcgcgggccggggattaggagacggaggcggactcggagccagggaaccaggggtncnggctagagctggagtcgtgagcncgcgcccgcnccgctctgggaggaccgcgagatgcccgtnctgaagcagctgggccccgcgtcacccaagaancggnctgat

SEQ ID NO: 634 - DNA, 330 bp, Homo sapiens
  misc_feature (324): n equals a,t,g, or c
  misc_feature (325): n equals a,t,g, or c
  misc_feature (326): n equals a,t,g, or c
  misc_feature (327): n equals a,t,g, or c
  misc_feature (329): n equals a,t,g, or c
cagaatcctctttcctccccatttggccctgggctcaggggaccaggtggggcgggtggggagctgtccggtgctaccacaccgtgccctcagtggactaaccacagcagcagccagggatgggccctggaggttcccggccggagagtgcctctcccctctgccatccacgtcaggtctttggtggggggaccccaaagccattctgggaagggctccagagtccagccgtccagctgctcctttcccagtttgatttcaataaatctgtccactccccttttgtgggggtgaacgttttaacagccaaaaaaaaaaaaaaannnnana

SEQ ID NO: 635 - DNA, 111 bp, Homo sapiens
  misc_feature (11): n equals a,t,g, or c
  misc_feature (19): n equals a,t,g, or c
  misc_feature (24): n equals a,t,g, or c
  misc_feature (35): n equals a,t,g, or c
  misc_feature (38): n equals a,t,g, or c
  misc_feature (109): n equals a,t,g, or c
caatcccggtntacccagngtccnttttccccccncangaaaagaaacaacaacttggggtaaaaaaaaaaaaaaaaaaaaaaaaaaaaaaaaaaaaaataaagaaagntc

SEQ ID NO: 636 - DNA, 298 bp, Homo sapiens
  misc_feature (198): n equals a,t,g, or c
  misc_feature (211): n equals a,t,g, or c
  misc_feature (220): n equals a,t,g, or c
  misc_feature (225): n equals a,t,g, or c
  misc_feature (288): n equals a,t,g, or c
aattcggcacagcttaatcacccttgctcctcctgggtgcctggaagatggactggcagagacctgtttgttgcgttttgtgctttgatgccaggaatgccgcctagtttatgtccccggtgggggcacacagcggggggcgccaggttttccttgtcccccagctgctctgccccttttccccttcttccctgactncaggcctgaaccngtcccgtgnctgtnaataaatctttgtgaaattaaaaaaaaaaaaaaaaaaaactcgggggggggcccggtaccaanttgggccctt

SEQ ID NO: 637 - DNA, 491 bp, Homo sapiens
  misc_feature (58): n equals a,t,g, or c
  misc_feature (64): n equals a,t,g, or c
  misc_feature (70): n equals a,t,g, or c
  misc_feature (114): n equals a,t,g, or c
  misc_feature (119): n equals a,t,g, or c
  misc_feature (133): n equals a,t,g, or c
  misc_feature (139): n equals a,t,g, or c
  misc_feature (157): n equals a,t,g, or c
  misc_feature (221): n equals a,t,g, or c
  misc_feature (255): n equals a,t,g, or c
  misc_feature (298): n equals a,t,g, or c
  misc_feature (365): n equals a,t,g, or c
  misc_feature (367): n equals a,t,g, or c
  misc_feature (371): n equals a,t,g, or c
  misc_feature (381): n equals a,t,g, or c
  misc_feature (390): n equals a,t,g, or c
  misc_feature (414): n equals a,t,g, or c
  misc_feature (428): n equals a,t,g, or c
  misc_feature (469): n equals a,t,g, or c
  misc_feature (473): n equals a,t,g, or c
  misc_feature (474): n equals a,t,g, or c
ggcagagccccagaagagcaggacgccctgtacctgcagagaagggaagcagcctctntacctnatctgnggctaccagagagcagaaaggacccaccctgggactcttctgtntgttngaaagatgcgccanccctgncccccggcttcccctctntccgccacagaacccagttttctagaccagggggacgggcacccatcactccgcaggcgaaatnaaagcccccctgccccggccctaaacccctgtgncctcctttcccatggtttccccgagagccagttacaaccctgncccgggccttaacccccatggcttcttttctgtggttttcccccagaggccagttagttcccaactngnaaanccgtttgggnttccccatnaaaaaaaattttggtttcattttnaaaaaaaaaagggnaggagggggggggcccggttaaccatttgggctttaagtgngtgnnttttaaaattaattggc

SEQ ID NO: 638 - DNA, 331 bp, Homo sapiens
  misc_feature (4): n equals a,t,g, or c
  misc_feature (17): n equals a,t,g, or c
  misc_feature (29): n equals a,t,g, or c
  misc_feature (55): n equals a,t,g, or c
  misc_feature (79): n equals a,t,g, or c
  misc_feature (111): n equals a,t,g, or c
  misc_feature (135): n equals a,t,g, or c
  misc_feature (142): n equals a,t,g, or c
  misc_feature (148): n equals a,t,g, or c
  misc_feature (163): n equals a,t,g, or c
  misc_feature (206): n equals a,t,g, or c
  misc_feature (218): n equals a,t,g, or c
  misc_feature (257): n equals a,t,g, or c
  misc_feature (277): n equals a,t,g, or c
  misc_feature (286): n equals a,t,g, or c
  misc_feature (309): n equals a,t,g, or c
  misc_feature (321): n equals a,t,g, or c
ccgnagctgggtatctnaaatctcctttnatccagccactgcccaaagccatctncctgcctactggatgcttacagtnactgtggatacgggggttccctttccccattnagtgacatgtcctctctgcttggngtaaacnattctngggaggacacttttnccaataaactctttccccagctgattagtgtctaaggaatganccaatacttgtntgcccttttccttggactattaacaattgcctgggaggnttagcaagaggaagcctgtntgtaatttnatttcaaaaaggcaaaatagagngttttacagtcntaggggaatt

SEQ ID NO: 639 - DNA, 444 bp, Homo sapiens
  misc_feature (235): n equals a,t,g, or c
  misc_feature (236): n equals a,t,g, or c
  misc_feature (237): n equals a,t,g, or c
  misc_feature (426): n equals a,t,g, or c
ccgagttccagagcatggggtctcggttgtcccagccttttgagtcctatatcactgcgcctcccggtaccgccgccgcgcccgccaaacctgcgcccccagctacacccggagcgccgacctccccagcagaacaccgcctgttgaagacctgctggagctgtcgcgtgctttctgggttggggctgatgggggcgggcgggtacgtgtactgggtggcacggaagcccatgannntgggataccccccgagtccatggaccattacgcagatggtcatcggcctcagtgagaatcaaggcattgccacctggggtatcgttgtcatggcagaccccaaagggaaggcctaaccgcgttgtttgaaagtaccaccagtgaatctgtcttctgtctctgtccctttccccgtgacacacagagcangcatggaatttaatgggt

SEQ ID NO: 640 - DNA, 598 bp, Homo sapiens
  misc_feature (205): n equals a,t,g, or c
  misc_feature (397): n equals a,t,g, or c
  misc_feature (469): n equals a,t,g, or c
  misc_feature (484): n equals a,t,g, or c
  misc_feature (518): n equals a,t,g, or c
  misc_feature (520): n equals a,t,g, or c
  misc_feature (543): n equals a,t,g, or c
  misc_feature (557): n equals a,t,g, or c
  misc_feature (568): n equals a,t,g, or c
gacccactccaccttactaccagacaaccttagccaaaccatttacccaaataaagtataggcgatagaaattgaaacctggcgcaatagatatagtaccgcaagggaaagatgaaaaattataaccaagcataatatagcaaggactaacccctataccttctgcataatgaattaactagaaataactttgcaaggagagccnaaggttaagacccccgaaaccagacgagctacctaagaacagctaaaagagcacacccgtctatgtagcaaaatagtgggaagatttataggtagaggcgacaaacctaccgagcctggtgatagctggttgtccaagatagaatcttagttcaactttaaatttgccacagaaccctctaaatccccttgnaaatttaactgtagtccaaagaggaacagctctttggacactaggaaaaaaccttgtagagagaggaaaaanttacacccatagtangcctaaaagcagcaccaattaagaaagggtcaantnacaccatactaaaatccaacctntactgactctacanccattggccantttcctttaaaccaggggtatccgaacttc

SEQ ID NO: 641 - DNA, 466 bp, Homo sapiens
  misc_feature (17): n equals a,t,g, or c
  misc_feature (18): n equals a,t,g, or c
  misc_feature (19): n equals a,t,g, or c
  misc_feature (258): n equals a,t,g, or c
  misc_feature (280): n equals a,t,g, or c
  misc_feature (314): n equals a,t,g, or c
  misc_feature (337): n equals a,t,g, or c
  misc_feature (376): n equals a,t,g, or c
  misc_feature (443): n equals a,t,g, or c
  misc_feature (464): n equals a,t,g, or c
  misc_feature (465): n equals a,t,g, or c
  misc_feature (466): n equals a,t,g, or c
ggtcctaaactactaannntgcattaaaaatttcggttggggcgacctcggagcagaacccaacctccgagcagtacatgctaagacttcaccagtcaaagcgaactactatactcaattgatccaataacttgaccaacggaacaagttaccctagggataacagcgcaatcctattctagagtccatatcaacaatagggtttacgacctcgatgttggatcaggacatcccgatggtgcagccgctattaaaggntcgtttggtcaacgattaaagncctacgtgatctgagttcagaccggagtaatcanggcgggttctatctacttcaaantcttcctgtacgaaaggacaagagaaataaggctacttnacaaagcgccttccccgtaatgatatcatcttaacttagtattatacccacacccacccaagaacangggttggtaagaaaaaaaaannn

SEQ ID NO: 642 - DNA, 575 bp, Homo sapiens
  misc_feature (5): n equals a,t,g, or c
  misc_feature (7): n equals a,t,g, or c
  misc_feature (20): n equals a,t,g, or c
  misc_feature (30): n equals a,t,g, or c
  misc_feature (116): n equals a,t,g, or c
  misc_feature (123): n equals a,t,g, or c
  misc_feature (127): n equals a,t,g, or c
  misc_feature (130): n equals a,t,g, or c
  misc_feature (134): n equals a,t,g, or c
  misc_feature (140): n equals a,t,g, or c
  misc_feature (143): n equals a,t,g, or c
  misc_feature (150): n equals a,t,g, or c
  misc_feature (173): n equals a,t,g, or c
  misc_feature (193): n equals a,t,g, or c
  misc_feature (238): n equals a,t,g, or c
  misc_feature (309): n equals a,t,g, or c
  misc_feature (327): n equals a,t,g, or c
  misc_feature (424): n equals a,t,g, or c
  misc_feature (491): n equals a,t,g, or c
  misc_feature (492): n equals a,t,g, or c
  misc_feature (497): n equals a,t,g, or c
  misc_feature (532): n equals a,t,g, or c
  misc_feature (543): n equals a,t,g, or c
gttgnancagtccactctgnctttaaaacntagtgattacaatatttagaaagttttgagcacttgctataagttttttaattaacatcactagtgacactaataaaattaacttnttagaangcangangtgnttgtgngtnacaaatncagaaagtgaactgcagtgctgnaatacacatgttaatactgnttttcttctatctgtagttagtacaggatgaatttaaatgtgctnttcctgagagacaaggaagacttgggtatttcccaaaacaggtaaaaatcttaaatgtgcaccaagagcangaggatcaacttttaggncattgatgatctgtaaagacaacaaatccctttttttttctcaattgacttaactgcatgagttctggtttatctacctctaaagcaaatctgcagngttccaaagactttggtatggattaagcgctgccagtaacaaaatgaagtctcaaaacagagctcanntgcanaaaagcatattttctgcggttctggactgcactgntgccttgcctnacatagacactcagacacccttacaaacacag

SEQ ID NO: 643 - DNA, 492 bp, Homo sapiens
  misc_feature (40): n equals a,t,g, or c
  misc_feature (125): n equals a,t,g, or c
  misc_feature (310): n equals a,t,g, or c
  misc_feature (461): n equals a,t,g, or c
  misc_feature (492): n equals a,t,g, or c
gaccttctgcataatgaattaactagaaataactttgcanggagagccaaagctaagacccccgaaaccagacgagctacctaagaacagctaaaagagcacacccgtctatgtagcataatagngggaagatttataggtagaggcgacaaacctaccgagcctggtgatagctggttgtccaagatagaatcttagttcaactttaaatttgcccacagaaccctctaaatccccttgtaaatttaactgttagtccaaagaggaacagctctttggacactaggaaaaaaccttgtagagagagtanaaaatttaacacccatagtaggcctaaaagcagccaccaattaagaaagcgtcaagctcaacacccactacctaaaaaatcccaaacatataactgaactcctacacccaattggaccaatctatcaccctatagaagaactaatggtagnataagtaacatgaaaacattctccttcgcan

SEQ ID NO: 644 - DNA, 68 bp, Homo sapiens
  misc_feature (6): n equals a,t,g, or c
  misc_feature (10): n equals a,t,g, or c
  misc_feature (41): n equals a,t,g, or c
  misc_feature (58): n equals a,t,g, or c
gatacntcantgggaacagggcccatggaaatgtacaggantttccctattttggtgntcagcttgaa

SEQ ID NO: 645 - DNA, 488 bp, Homo sapiens
  misc_feature (265): n equals a,t,g, or c
  misc_feature (290): n equals a,t,g, or c
  misc_feature (302): n equals a,t,g, or c
  misc_feature (336): n equals a,t,g, or c
  misc_feature (342): n equals a,t,g, or c
  misc_feature (365): n equals a,t,g, or c
  misc_feature (385): n equals a,t,g, or c
  misc_feature (420): n equals a,t,g, or c
ggcacagcgctcgtccacggtcttctgcatcactggtatacacactcgttagcgtccatttcttatttaattagaatggataagatgatgttaaatgccttggtttgatttctagtatctattgtgttggctttacaaataattttttgcagtcttttgctgtgctgttacattactgtatgtataaattatgaaggacctggaaataaggtataaggatcttttgtaaatggagacacatacaaaaaaaatctttgaatggttnaatagggatggaatggggaaagtgnttttggaaaganattcccattttgccggggagactatttgaagtgnccatcnttgtcccaaacaaggtaaatttntttttgtaaagtgccaagtnccggcaggcagaaggaaccgtttacagtgtgattnaagaaagggaaaccgtgccctttttagcctccaaacccaattgaccataatttacaggccccggtttg

SEQ ID NO: 646 - DNA, 302 bp, Homo sapiens
  misc_feature (287): n equals a,t,g, or c
  misc_feature (288): n equals a,t,g, or c
  misc_feature (290): n equals a,t,g, or c
  misc_feature (297): n equals a,t,g, or c
  misc_feature (302): n equals a,t,g, or c
ggatgtttttatattacatgaatttaataataaactaaacttttttttgtctcccgttattgaaaagtaccaaagcttctttctgttgtgtttgattttactataggggttttgctttttctagagatacttttcatttaacagcttttgttaagtgtcaggctgcactttgctccatataattattgttttcagatttcaacttgtatgtgtttgtctcttaaagcattggtgaaatcacatattttatattcagcataaaggagaataaattccagaaaacacannanaaaaaanaaaan

SEQ ID NO: 647 - DNA, 137 bp, Homo sapiens
  misc_feature (13): n equals a,t,g, or c
  misc_feature (15): n equals a,t,g, or c
  misc_feature (112): n equals a,t,g, or c
  misc_feature (114): n equals a,t,g, or c
  misc_feature (115): n equals a,t,g, or c
  misc_feature (117): n equals a,t,g, or c
  misc_feature (132): n equals a,t,g, or c
gggcgggggggcntnccccgaggggctctcgcttctggcgccaagcgcccggtcgcgcgccggccgggcgctacccgctccggggacagtgccaggtggggagtatgactgngnngnaacacctgttaaacnggaac

SEQ ID NO: 648 - DNA, 432 bp, Homo sapiens
ggcacgagctgcagcggggtgagcggcggcagcggccggggatcctggagccatggggcgcgcgcgcgacgccatcctggatgcgctggagaacctgaccgccgaggagctcaagaagttcaagctgaagctgctgtcggtgccgctgcgcgagggctacgggcgcatcccgcggggcgcgctgctgtccatggacgccttggacctcaccgacaagctggtcagcttctacctggagacctacggcgccgagctcaccgctaacgtgctgcgcgacatgggcctgcaggagatggccgggcagctgcaggcggccacgcaccagggctctggagccgcgccactgggatccaggcccctcctcagtcggcagccaagccaagcctgcactttaatagaccagcaccgggcttcgttatcgcgaaggtcaaa

SEQ ID NO: 649 - DNA, 544 bp, Homo sapiens
  misc_feature (395): n equals a,t,g, or c
  misc_feature (438): n equals a,t,g, or c
  misc_feature (459): n equals a,t,g, or c
  misc_feature (505): n equals a,t,g, or c
  misc_feature (519): n equals a,t,g, or c
  misc_feature (531): n equals a,t,g, or c
  misc_feature (540): n equals a,t,g, or c
ctcctgcctcttctcaggggacctgctcttcctctctggctgtgggcggacctttgagggcaatgcagagaccatgctgagctcactggacactgtgctggggctaggggatgacacccttctgtggcctcaagtgtgatgccttacaaaagcaccactcagatgggcagctggactctggtgtcctgagactctgccctcttcccacagcctccctgccccacccatccctgcaaagccatttttcagacagagccattcctaagaacactgaagggctggaatgctggctggccactctctgcctcagtggcctccctaaagcctggaagaaggagggtcctgattgccaaggaaacctcctcattgggctaaggagacactggagtctggantgtggagccccacagtcttgcaggtcaaatgctctccttgcanatctggcctggttgtaaccantgggctctggctctgccctgggggcaaaaggggccctccttgccangggagaaaagccanggtctctttggncgatggtgnaatc

SEQ ID NO: 650 - DNA, 406 bp, Homo sapiens
  misc_feature (234): n equals a,t,g, or c
  misc_feature (272): n equals a,t,g, or c
  misc_feature (374): n equals a,t,g, or c
  misc_feature (393): n equals a,t,g, or c
ctccaccttactaccagacaaccttaaccaaaccatttacccaaataaagtataggcgatagaaattgaaacctggcgcaatagatatagtaccgcaagggaaagatgaaaaattataaccaagcataatatagcaaggactaacccctataccttctgcataatgaattaactagaaataactttgcaaggaagagccaaagctaagacccccgaaaccagacgagctacctnagaacagcttaaagagcacacccctctatttttgccanaatagtgggaaagatttataggtttgaaggcgaacaaacctaccgagcctggttgattagcttgtttgtcccaagattagaatctttatttcccactttttnatttttgccccaccagaanccctccttttaaa

SEQ ID NO: 651 - DNA, 444 bp, Homo sapiens
  misc_feature (196): n equals a,t,g, or c
  misc_feature (237): n equals a,t,g, or c
  misc_feature (275): n equals a,t,g, or c
  misc_feature (299): n equals a,t,g, or c
  misc_feature (313): n equals a,t,g, or c
  misc_feature (322): n equals a,t,g, or c
  misc_feature (361): n equals a,t,g, or c
  misc_feature (388): n equals a,t,g, or c
  misc_feature (412): n equals a,t,g, or c
  misc_feature (420): n equals a,t,g, or c
  misc_feature (444): n equals a,t,g, or c
ggaaagatgaaaaattataaccaagcataatatagcaaggactaacccctataccttctgcataatgaattaactagaaataactttgcaagggagagccaaagctaagacccccgaaaccagacgagctacctaagaaacagctaaaagagcacacccgtctatgtagcaaaatagtgggaagatttataggtanaggcgacaaacctaccgagcctggtgatagctggtttcccnaagaatagaatcttagttcaactttaaatttgcccacngaaccctctaaatcccccttgttnaatttaactgtttngtcccaaanaaggaacagctccttttgggaccctaggaaaaaaccttnttaaaaaaaagtttaaaaaattttacnccccttgtttggccttaaaacccnccccccanttaaaaaaggtttcaaactcccan

SEQ ID NO: 652 - DNA, 69 bp, Homo sapiens
  misc_feature (20): n equals a,t,g, or c
  misc_feature (24): n equals a,t,g, or c
  misc_feature (32): n equals a,t,g, or c
  misc_feature (40): n equals a,t,g, or c
  misc_feature (57): n equals a,t,g, or c
ctttttttttttttaaatangtanctccattntttttctnttttccaagatggccgntgttatggtttt

SEQ ID NO: 653 - DNA, 649 bp, Homo sapiens
  misc_feature (232): n equals a,t,g, or c
  misc_feature (235): n equals a,t,g, or c
  misc_feature (240): n equals a,t,g, or c
  misc_feature (253): n equals a,t,g, or c
  misc_feature (268): n equals a,t,g, or c
  misc_feature (270): n equals a,t,g, or c
  misc_feature (275): n equals a,t,g, or c
  misc_feature (283): n equals a,t,g, or c
  misc_feature (284): n equals a,t,g, or c
  misc_feature (310): n equals a,t,g, or c
  misc_feature (313): n equals a,t,g, or c
  misc_feature (324): n equals a,t,g, or c
  misc_feature (344): n equals a,t,g, or c
  misc_feature (351): n equals a,t,g, or c
  misc_feature (352): n equals a,t,g, or c
  misc_feature (354): n equals a,t,g, or c
  misc_feature (364): n equals a,t,g, or c
  misc_feature (367): n equals a,t,g, or c
  misc_feature (374): n equals a,t,g, or c
  misc_feature (384): n equals a,t,g, or c
  misc_feature (393): n equals a,t,g, or c
  misc_feature (396): n equals a,t,g, or c
  misc_feature (398): n equals a,t,g, or c
  misc_feature (417): n equals a,t,g, or c
  misc_feature (420): n equals a,t,g, or c
  misc_feature (424): n equals a,t,g, or c
  misc_feature (429): n equals a,t,g, or c
  misc_feature (433): n equals a,t,g, or c
  misc_feature (444): n equals a,t,g, or c
  misc_feature (457): n equals a,t,g, or c
  misc_feature (477): n equals a,t,g, or c
  misc_feature (497): n equals a,t,g, or c
  misc_feature (504): n equals a,t,g, or c
  misc_feature (513): n equals a,t,g, or c
  misc_feature (525): n equals a,t,g, or c
  misc_feature (532): n equals a,t,g, or c
  misc_feature (568): n equals a,t,g, or c
  misc_feature (591): n equals a,t,g, or c
  misc_feature (605): n equals a,t,g, or c
  misc_feature (617): n equals a,t,g, or c
  misc_feature (646): n equals a,t,g, or c
ccagtagatttgtattaaaagaaaaaaaaatggggccttagcttctggcttttaattttgccagctaaggacataaaacaaaaataaacaaacaaaaacaaatagccatctgctatcagcatcattatgtaaaagaaaatatattttagcccctaaaattaggaagaatgtaatctcagaataaaggttgtcatttaagttgaataaatatatagctttatgaaaaacatanaanaaaanaaaaaaaaaaaangccccgaaaggaccntnttaancaaaaccnnattgaaaaggcttggaaaaacaaagncgnttgaaagctgnttccagtaaaccaaaccaanccagtanngnggggcaattngtngccttancagtacccantcaaaaaanagngntttgggaaaagggggaaanaanaggnaatcngaancttaagcttanacttttgggaaanattcccccttggaaattganaagttttttggggaaaaggnaaaaggnacaaccttnttgaaaatttanggggggnattaaacttaaatttgcctaattggggggaaccccntttaaaaaaaaattggacttggngactaaagttgcantgaaattttttncccttaaaaaaggggccttgttacccttnagg

SEQ ID NO: 654 - DNA, 598 bp, Homo sapiens
  misc_feature (251): n equals a,t,g, or c
  misc_feature (343): n equals a,t,g, or c
  misc_feature (433): n equals a,t,g, or c
  misc_feature (455): n equals a,t,g, or c
  misc_feature (517): n equals a,t,g, or c
  misc_feature (522): n equals a,t,g, or c
  misc_feature (561): n equals a,t,g, or c
  misc_feature (590): n equals a,t,g, or c
  misc_feature (592): n equals a,t,g, or c
gcgggcctcaccttgccgtcgcactgcctcttgcccagcttggtctcctcagggtggtagaaccacttgaccttgaccaccatgttgctgccccacgactcccacatgctctcgatgcggccgatgtaggggaggttgggccgcccagctgacaggaagacggcacagtccccgacacgcagggtctcctcgccccgcacgatggccttgtaaaacagcttccgggccttccccttcatgccacgccgctntgggggacatgggcagggtggctctgaaaagccggggggctgtggggacagattgcggccaggaagcatggaaggtgtggtgtgggtgtgantgtgaatctgaatgtgagtgtgcagggcgcccacaagggcaggaagccgcagcaccgcggcttaaggccatggcagccatggatctggancaagggccacgcctccacggancccgcacatggaatcatgactctggacactggatctggggacagggacatgtggacaagacnttcancacagtgttttttacgaaggcggaagaaccacgaatggncccccatgcgccccccaacaattgccctngnttaaga

SEQ ID NO: 655 - DNA, 433 bp, Homo sapiens
  misc_feature (298): n equals a,t,g, or c
  misc_feature (312): n equals a,t,g, or c
  misc_feature (347): n equals a,t,g, or c
  misc_feature (401): n equals a,t,g, or c
  misc_feature (415): n equals a,t,g, or c
  misc_feature (416): n equals a,t,g, or c
  misc_feature (431): n equals a,t,g, or c
aaaagctatattttgaagactggggttatttcagaaaaaactacagccctttttgtcttacctgccttttactttcgtgtggatatgtgaagcattgggtcgggaactagctgtagaacacaactaaaaactcatgtcttttttcacagaataatgtgccagttttttgtagcaatgatatttctcttggaaagccagaaatgctttgtaccagagcacctccaaactgcattgagaaaaaattcccagaaccatcccctttttccatttttatattatttataaagaaagattaaanctgttttgactatnttacagccctggaatttactacctccctgtttctntctccccggaaaaaatgaaaccaacgattgggttcctttgaattcccgttcccncctcccgttatttnnaaaatcccccccttntt

SEQ ID NO: 656 - DNA, 450 bp, Homo sapiens
  misc_feature (7): n equals a,t,g, or c
  misc_feature (123): n equals a,t,g, or c
  misc_feature (135): n equals a,t,g, or c
  misc_feature (136): n equals a,t,g, or c
  misc_feature (336): n equals a,t,g, or c
  misc_feature (350): n equals a,t,g, or c
  misc_feature (355): n equals a,t,g, or c
  misc_feature (395): n equals a,t,g, or c
  misc_feature (414): n equals a,t,g, or c
  misc_feature (428): n equals a,t,g, or c
  misc_feature (435): n equals a,t,g, or c
tcgaccngggcttccgcatggctgctcctgtacgtatcacggtcttgtgctctaaggaaaacgacagcacgtgttctttttcactagtagaagtgacgttggtttcatgttgggggggggggngccatttttttnntgtttcagtggagagcaaaatgaataacaaagcgggctcctttttctggaaccttagacaattcagtacattagtttcaacaagcagaactatgaggctatgttgtttgggactttgcaaaccaaaaatagttccattcaaactggaacattttgaaataactttcataacagaatgcaatcaacggatgatcattgagngagcgcttgcaggntgccntcatttttgaaatcagatgttggccttgcaaacaaagggncataaagcactccaacagncccttagaaattgnaaagacnacctttatgctaaaa

SEQ ID NO: 657 - DNA, 434 bp, Homo sapiens
  misc_feature (6): n equals a,t,g, or c
  misc_feature (80): n equals a,t,g, or c
  misc_feature (412): n equals a,t,g, or c
  misc_feature (427): n equals a,t,g, or c
  misc_feature (433): n equals a,t,g, or c
ttttangttgttaaatacctgtaggtttcttttaatcataaagaaggaaaatgaaagacttgaggatcacctacatagancgaaaacagaaaaaaaccccgaatcccattactttgacagtgtttttagacctgtgttactaaaaaaaagatgaatgtcctgaaaagggtgttgggagggtggttcaacaaagaaacaaagatgttatggtgtttagatttatggttgttaaaaatgtcatctcaagtcaagtcactggtctgtttgcatttgatacatttttgtactaactagcattgtaaaattatttcatgattagaaattacctgtggatatttgtataaaagtgtggaataattttttataaaagggtccatggttcgtaacccgccttgtatatggggagccaacncccaaattataatgncccccna

SEQ ID NO: 658 - DNA, 397 bp, Homo sapiens
  misc_feature (7): n equals a,t,g, or c
  misc_feature (10): n equals a,t,g, or c
  misc_feature (15): n equals a,t,g, or c
  misc_feature (17): n equals a,t,g, or c
  misc_feature (28): n equals a,t,g, or c
  misc_feature (360): n equals a,t,g, or c
  misc_feature (377): n equals a,t,g, or c
  misc_feature (383): n equals a,t,g, or c
  misc_feature (392): n equals a,t,g, or c
  misc_feature (395): n equals a,t,g, or c
gacagtnacngtccngnattcccgggtncgaccctcggcgtccggaagagtcttcatgtggacagtctcagggacaccatgtagagaattttggtctcgattcagaaaagagaaagagccagtggttgttgagacagtagaagagaaaaaggaacctatcctagtgtgtccacctttacgaagccgagcatacacaccacctgaagatctccagagtcgtttggaatcttacgttaaagaagtttttggttcatctcttcctagtaattggcaagacatctccctggaagatagtcgtctaaagttcaatcttctggctcatttagctgatgacttgggtcatgtagtccctaaactccngactccaccagatgtgnagggtnagagatgtnctnga

SEQ ID NO: 659 - DNA, 156 bp, Homo sapiens
  misc_feature (2): n equals a,t,g, or c
  misc_feature (7): n equals a,t,g, or c
  misc_feature (10): n equals a,t,g, or c
  misc_feature (12): n equals a,t,g, or c
  misc_feature (90): n equals a,t,g, or c
  misc_feature (94): n equals a,t,g, or c
  misc_feature (98): n equals a,t,g, or c
  misc_feature (130): n equals a,t,g, or c
  misc_feature (150): n equals a,t,g, or c
gnagccnttngnaacgttcttggcggaatcagcggggaaagaagaccctgttgagcttgactctagtctggcacggtgaagagacatganaggngtanaataagtgggaggcccccggcgcccccccggngtccccgcgaggggcccggngcgggg

SEQ ID NO: 660 - DNA, 276 bp, Homo sapiens
  misc_feature (242): n equals a,t,g, or c
  misc_feature (255): n equals a,t,g, or c
  misc_feature (258): n equals a,t,g, or c
  misc_feature (261): n equals a,t,g, or c
  misc_feature (267): n equals a,t,g, or c
gcagtttagttttaccctactgatgatgtgttgttgccatggtaatcctgctcagtacgagaggaaccgcaggttcagacatttggtgtatgtgcttggctgaggagccaatggggcgaagctaccatctgtgggattatgactgaacgcctctaagtcagaatcccgcccaggcggaacgatacggcagcgccgcggagcctcggttggcctcggatagccggtccccccgctgtccccgncggcgggcagccnccnctntacgangcccaccgc

SEQ ID NO: 661 - DNA, 275 bp, Homo sapiens
  misc_feature (4): n equals a,t,g, or c
  misc_feature (5): n equals a,t,g, or c
  misc_feature (14): n equals a,t,g, or c
  misc_feature (25): n equals a,t,g, or c
  misc_feature (33): n equals a,t,g, or c
  misc_feature (186): n equals a,t,g, or c
  misc_feature (225): n equals a,t,g, or c
  misc_feature (250): n equals a,t,g, or c
  misc_feature (259): n equals a,t,g, or c
cgtnncctactgangatgtgttgangccatggnaatcctgctcagtacgagaggaaccgcaggttcagacatttggtgtatgtgcttggctgaggagccaatggggcgaagctaccatctgtgggattatgactgaacgcctctaagtcagaatcccgcccaggcggaacgatacggcagcgccgnggagcctcggatggctcggatagccggtcccccgcctgnccccgccggcgggccgccccccctncacgcgccncgcgcgcgcgggaaag

SEQ ID NO: 662 - DNA, 506 bp, Homo sapiens
  misc_feature (51): n equals a,t,g, or c
  misc_feature (69): n equals a,t,g, or c
  misc_feature (183): n equals a,t,g, or c
  misc_feature (191): n equals a,t,g, or c
  misc_feature (345): n equals a,t,g, or c
  misc_feature (363): n equals a,t,g, or c
  misc_feature (383): n equals a,t,g, or c
  misc_feature (432): n equals a,t,g, or c
  misc_feature (445): n equals a,t,g, or c
  misc_feature (466): n equals a,t,g, or c
  misc_feature (481): n equals a,t,g, or c
  misc_feature (487): n equals a,t,g, or c
gtgcctttcatttttatattaccacagatactttcctcatagtcttgccantgcttgtagaatgcttanaaaaagcttgataaaccactgggctaagtacacagagggagaggctagcagtatttttaaattggtttctaaattttttatagcttgatggtagataacacatttgcttcaatnaaggtaanccggaaaaaacaaatcctcaaaaagacctctcaattagaattcttaaatgacaatgttttctttatcatatatttgagagattgatttaaagaaaaatatgcttgactatctgaaataatattttaaccctatcataaaatctctgcctggtanaacagctgactgtggaanggtaaaatgcagagaaccantcattggatctcccttctctactttgttactgaaatcttgaacctgtanaacaattacttancactggggttcctttcctaangggaaaataatactnaacacntgcagagtaatttttaaaa

SEQ ID NO: 663 - DNA, 550 bp, Homo sapiens
  misc_feature (420): n equals a,t,g, or c
  misc_feature (480): n equals a,t,g, or c
  misc_feature (501): n equals a,t,g, or c
  misc_feature (510): n equals a,t,g, or c
  misc_feature (528): n equals a,t,g, or c
  misc_feature (532): n equals a,t,g, or c
gagttggtggagcgatttgtctggttaattccgataacgaacgagacaaccttagccaaaccatttacccaaataaagtataggcgatagaaattgaaacctggcgcaatagatatagtaccgcaagggaaagatgaaaaattatagccaagcataatatagcaaggactaacccctataccttctgcataatgaattaactagaaataactttgcaaggagagccaaagctaagacccccgaaaccagacgagctacctaagaacagctaaaagagcacacccgtctatgtagcaaaatagtgggaagatttataggtagaggcgacaaacctaccgagcctggtgatagctgggttgtccaagatagaatcttaagttcaactttaaatttgccacagaaccctctaaatccccttgnaaatttaactggtagtcccaagaggaacagctctttggacactaggaaaaaaccttgtanagagagtaaaaaaattaacanccatagtangcctaaaagcagcaccantaanaaagcggtcaagctcaca

SEQ ID NO: 664 - DNA, 542 bp, Homo sapiens
  misc_feature (486): n equals a,t,g, or c
  misc_feature (499): n equals a,t,g, or c
  misc_feature (504): n equals a,t,g, or c
  misc_feature (514): n equals a,t,g, or c
  misc_feature (530): n equals a,t,g, or c
gcgtctatgtagcaaaatagtgggaagatttataggtagaggcgacaaacctaccgagcctggtgatagctggttgtccaagatagaatcttagttcaactttaaatttgcccacagaaccctctaaatccccttgtaaatttaactgttagtccaaagaggaacagctctttggacactaggaaaaaaccttgtagagagagtaaaaaatttaacacccatagtaggcctaaaagcagccaccaattaagaaagcgttcaagctcaacacccactacctaaaaaatccaacatataactgaactcctacacccaattggaccaatctatcaccctatagaagaactaatgttagtataagtaacatgaaaacattctcctccgcataagcctgcgtcagattaaaacactgaactgacaattaacagcccaatatctacaatcaaccaacaagtcattattaccctcactgtcaacccaacacangcatgctcataanggaanggttaaaaanaaaaaaaaaaactttngggggggcccgg

SEQ ID NO: 665 - DNA, 712 bp, Homo sapiens
  misc_feature (310): n equals a,t,g, or c
  misc_feature (324): n equals a,t,g, or c
  misc_feature (370): n equals a,t,g, or c
  misc_feature (429): n equals a,t,g, or c
  misc_feature (431): n equals a,t,g, or c
  misc_feature (525): n equals a,t,g, or c
  misc_feature (549): n equals a,t,g, or c
  misc_feature (600): n equals a,t,g, or c
  misc_feature (627): n equals a,t,g, or c
  misc_feature (635): n equals a,t,g, or c
  misc_feature (650): n equals a,t,g, or c
  misc_feature (687): n equals a,t,g, or c
  misc_feature (692): n equals a,t,g, or c
ggatggtgggagctccgtgcaaagtgaagctgaggcctctgtggatcccagtttgtcgtggggtcagaggaaaaaactttactatgacacggactatggttccaagtcccgaggccggcagagtcaacaggaggcagaggaggaggaaagagaggaggaggaggaggcacagatcattcagcggcgcctagcccaagcgctgcaagaggatgattttggtgtcgcctgggttgaggcctttgcaaaaccagtgcctcaggtagatgaggctgagacacgggtcgtgaaggatttggctaaaggttcagtngaaagaaaaacctnaaaatgttgcaaaaggaatcaccagaactcttggagcttatagaanaccttgaaagtcaagttgacagaagttaaggatgagctggagccattggtagaagttgntnggaacaaggggatcattccacccggaaaaaggaagccaatactttgaggaccaagtacaacctctacttgaattaattgctcgaacatcagttnttatttgatcctgaaagctagganagtcccagcacatggacatcttgtcatagaaaggcttgttcctaccgaaanttgatcaacaagctgtccgttgggatnaaaactgncctaaaaatcgcatntgttgcacttaggttatctttaaagaagactgtttcnaagcnaatcaccaagccaaaccaag

SEQ ID NO: 666 - DNA, 381 bp, Homo sapiens
  misc_feature (1): n equals a,t,g, or c
  misc_feature (12): n equals a,t,g, or c
  misc_feature (18): n equals a,t,g, or c
  misc_feature (20): n equals a,t,g, or c
  misc_feature (29): n equals a,t,g, or c
  misc_feature (344): n equals a,t,g, or c
  misc_feature (357): n equals a,t,g, or c
  misc_feature (361): n equals a,t,g, or c
  misc_feature (380): n equals a,t,g, or c
  misc_feature (381): n equals a,t,g, or c
ncacgcgtccgngggcancnaagtcgatnaatgtaaagaagaaatgaaagcctggtgtattgtacttcaagatgcctccctgatgtatagaatctccttgtaaaataaataattgcattgtatatcagtcttcccatcaatattaattattaaatattttagaatttttttatagttggtatttaaaaaaaaaaaaaaaaagggcggccgctctagaggatccctcgaggggcccaagctttacgcgtgcatgcgacgtccatagctctctccctatagtgagtcgtattattaagctaggcactggccgtgcggtttacaacgtccgtggactggggagatcngctagcttggggncctnggttgaaggaaccttactnn

SEQ ID NO: 667 - DNA, 437 bp, Homo sapiens
  misc_feature (71): n equals a,t,g, or c
  misc_feature (78): n equals a,t,g, or c
  misc_feature (261): n equals a,t,g, or c
  misc_feature (302): n equals a,t,g, or c
  misc_feature (314): n equals a,t,g, or c
  misc_feature (334): n equals a,t,g, or c
  misc_feature (371): n equals a,t,g, or c
  misc_feature (373): n equals a,t,g, or c
  misc_feature (392): n equals a,t,g, or c
  misc_feature (403): n equals a,t,g, or c
  misc_feature (408): n equals a,t,g, or c
tttgtgtgccttctctgctcctttctctggctgccctacccttcccctccacgctgcctgggcagcaaggnacagggnaccaacaggtagcaagtgtgccttcctcagggcccttcctgagagctccacagcccaccctgtggccccctgcttggcttggcctggcctgcccggccccagccttccaatgctgctgcacgtcctcattttcctttttggtcccctcctgccccctctggctgttctgcctttgggcctcanccccagctgcctgaatttgggcaaggttctttctctgtggncttcaagctcanccccaagggttcttgaaccngggctcttcccaacgggcccaaccctaacttaaaaantngaacccctggttttcaaantctttcttaantggtnaaaaaccccaatcccaagggtaaaatttc

SEQ ID NO: 668 - DNA, 365 bp, Homo sapiens
  misc_feature (8): n equals a,t,g, or c
  misc_feature (172): n equals a,t,g, or c
  misc_feature (239): n equals a,t,g, or c
  misc_feature (243): n equals a,t,g, or c
  misc_feature (244): n equals a,t,g, or c
  misc_feature (329): n equals a,t,g, or c
  misc_feature (330): n equals a,t,g, or c
  misc_feature (353): n equals a,t,g, or c
  misc_feature (358): n equals a,t,g, or c
  misc_feature (362): n equals a,t,g, or c
ggcagagnatctctgcaccctggggcctggaacagaactggcaaagaggcaagaggtcactgagggcctctgtcacccaggacctgcctcctgcctgcccctctcccgccagactgttagaaaatggacactgtgcccagcccggaccttgggcagcccaggccggggtggngcatgggcctgggccaccttctcttcctttgctgaggcctccagctttcaggcaggccaaggccttnttcnnccccacccgccctccccagggggcctcgggagctcaggtgggccccagtttcaatcttcccgttgttgttgttggggcccttaannttccccagcgttcccattttttnggcantttntgg

SEQ ID NO: 669 - DNA, 474 bp, Homo sapiens
  misc_feature (405): n equals a,t,g, or c
  misc_feature (454): n equals a,t,g, or c
  misc_feature (456): n equals a,t,g, or c
  misc_feature (458): n equals a,t,g, or c
  misc_feature (472): n equals a,t,g, or c
gtccaccttactaccagacaaccttagccaaaccatttacccaaataaagtataggcgatagaaattgaaacctggcgcaatagatatagtaccgcaagggaaagatgaaaaattataaccaagcataatatagcaaggactaacccctataccttctgcataatgaattaactagaaataactttgcaaggagagccaaagctaagacccccgaaaccagacgagctacctaagaacagctaaaagagcacacccgtctatgtagcaaaatagtgggaagatttataggtagaggcgacaaacctaccgagcctggtgatagctggttgtccaagatagaatcttagttcaactttaaatttgcccacagaacctcctaaatccccttgttaatttaacttgtnagtccaaagaagaacagctctttggacactaagaaaaaaccttgtagananantaaaaaatttaacncc

SEQ ID NO: 670 - DNA, 467 bp, Homo sapiens
  misc_feature (5): n equals a,t,g, or c
  misc_feature (12): n equals a,t,g, or c
  misc_feature (82): n equals a,t,g, or c
  misc_feature (110): n equals a,t,g, or c
  misc_feature (148): n equals a,t,g, or c
  misc_feature (169): n equals a,t,g, or c
  misc_feature (171): n equals a,t,g, or c
  misc_feature (188): n equals a,t,g, or c
  misc_feature (211): n equals a,t,g, or c
  misc_feature (215): n equals a,t,g, or c
  misc_feature (217): n equals a,t,g, or c
  misc_feature (219): n equals a,t,g, or c
  misc_feature (227): n equals a,t,g, or c
  misc_feature (229): n equals a,t,g, or c
  misc_feature (254): n equals a,t,g, or c
  misc_feature (282): n equals a,t,g, or c
  misc_feature (287): n equals a,t,g, or c
  misc_feature (300): n equals a,t,g, or c
  misc_feature (305): n equals a,t,g, or c
  misc_feature (313): n equals a,t,g, or c
  misc_feature (318): n equals a,t,g, or c
  misc_feature (325): n equals a,t,g, or c
  misc_feature (327): n equals a,t,g, or c
  misc_feature (332): n equals a,t,g, or c
  misc_feature (335): n equals a,t,g, or c
  misc_feature (336): n equals a,t,g, or c
  misc_feature (337): n equals a,t,g, or c
  misc_feature (343): n equals a,t,g, or c
  misc_feature (348): n equals a,t,g, or c
  misc_feature (359): n equals a,t,g, or c
  misc_feature (361): n equals a,t,g, or c
  misc_feature (367): n equals a,t,g, or c
  misc_feature (371): n equals a,t,g, or c
  misc_feature (386): n equals a,t,g, or c
  misc_feature (398): n equals a,t,g, or c
  misc_feature (405): n equals a,t,g, or c
  misc_feature (441): n equals a,t,g, or c
gccanagtgtancttaacacaaagcacccaacttacacttaggagatttcaacttaacttgaccgctctgagctaaacctanccccaaacccactccaccttactaccanacaaccttagccaaaccatttacccaaataaagtatangcgatacaaattgaaacctgncncaatacatatactaccnccagggaaacatgaaaaattatnaccnancntaatatancnaggactaacccctataccttctgcntaatgaattaactacaaataactttgcnacganagcccaagctaanacccnccaaaccncacanctacctnanaacanctnnnagaacnccccntctatgtaccnantactgngaanattatacgtaaaggnaccaacctaccnaacctgntgatactggttgtccacataaatcttattccctttnaatttgcccccaaacctcttaatccc

SEQ ID NO: 671 - DNA, 360 bp, Homo sapiens
  misc_feature (292): n equals a,t,g, or c
  misc_feature (316): n equals a,t,g, or c
gtggtttacctccacgtatttatttcaccttagcagatggaaacaaagtattttgctggataagaaagaccctaaaatggatatagaagtgtgtgtgtatccataaaatgcatatgtaaatttttttttgtttttaagcattcacccaaacaaaaaaatcacaggtaaacccatgtttctgagatgccattattccaagcaaaataagagataatcccttcaagttaaattgaaaattttcctgaaaccatacatttcaagtgaaataagtaattctagatagggcaatttnaattggataattttaaagtgtctnttattgcagtggtttatttgcaaattcctaaaagggaaaatttt

SEQ ID NO: 672 - DNA, 237 bp, Homo sapiens
  misc_feature (63): n equals a,t,g, or c
  misc_feature (75): n equals a,t,g, or c
  misc_feature (112): n equals a,t,g, or c
  misc_feature (168): n equals a,t,g, or c
  misc_feature (170): n equals a,t,g, or c
  misc_feature (210): n equals a,t,g, or c
  misc_feature (213): n equals a,t,g, or c
  misc_feature (227): n equals a,t,g, or c
  misc_feature (228): n equals a,t,g, or c
  misc_feature (236): n equals a,t,g, or c
ggcagaggttcgtctgggctcatgctgggatgtcgcagtgctcctgttgcaactcctcccagncagccaggtttnctgggggccaggctgggtgtcctcacaggagtagggnctacacccaattccaaaagcctgagaaagagagaagtggagggggaggcgagtttntnaataaaggctcccatcaggtcaaaaaaaaaaaaaaaaaanttnggggggggccccgnncccaattng

SEQ ID NO: 673 - DNA, 429 bp, Homo sapiens
  misc_feature (240): n equals a,t,g, or c
  misc_feature (385): n equals a,t,g, or c
  misc_feature (387): n equals a,t,g, or c
  misc_feature (426): n equals a,t,g, or c
  misc_feature (427): n equals a,t,g, or c
  misc_feature (429): n equals a,t,g, or c
tttgcctgctcccggcgaggggtggctttgatttcggcgatgagctcccagaaaggcaacgtggctcgttccagacctcagaagcaccagaatacgtttagcttcaaaaatgacaagttcgataaaagtgtgcagaccaagaaaattaatgcaaaacttcatgatggagtatgtcagcgctgtaaagaagttcttgagtggcgtgtaaaatacagcaaatacaaaccattatcaaaaccnaaaaagtgtgttaaatgtttacaaaagacagtgaaggattcttatcacgtaatgtgcaggccatgtgccctgtgaacttgaagtttgcgcaaaatgttggaagaaaggagaccttgtattccaatcctgggccaaagaatccagncncaagagttggaagcttagaaaggagttccactcaggggnntn

SEQ ID NO: 674 - DNA, 134 bp, Homo sapiens
  misc_feature (8): n equals a,t,g, or c
  misc_feature (14): n equals a,t,g, or c
  misc_feature (41): n equals a,t,g, or c
  misc_feature (48): n equals a,t,g, or c
  misc_feature (70): n equals a,t,g, or c
  misc_feature (124): n equals a,t,g, or c
  misc_feature (127): n equals a,t,g, or c
cttccccntgccangtttgtaaacagcgtgatacccgaganctctcgnctgccatagggtagctcaggcntgtccagctacaccccgaatcactctgtggccttcagcaagtggcatgagcagncgntggagca

SEQ ID NO: 675 - DNA, 274 bp, Homo sapiens
  misc_feature (9): n equals a,t,g, or c
  misc_feature (13): n equals a,t,g, or c
  misc_feature (20): n equals a,t,g, or c
  misc_feature (22): n equals a,t,g, or c
  misc_feature (37): n equals a,t,g, or c
  misc_feature (39): n equals a,t,g, or c
  misc_feature (48): n equals a,t,g, or c
  misc_feature (50): n equals a,t,g, or c
  misc_feature (57): n equals a,t,g, or c
  misc_feature (76): n equals a,t,g, or c
  misc_feature (79): n equals a,t,g, or c
  misc_feature (97): n equals a,t,g, or c
  misc_feature (108): n equals a,t,g, or c
  misc_feature (128): n equals a,t,g, or c
  misc_feature (148): n equals a,t,g, or c
  misc_feature (207): n equals a,t,g, or c
  misc_feature (222): n equals a,t,g, or c
  misc_feature (225): n equals a,t,g, or c
  misc_feature (235): n equals a,t,g, or c
  misc_feature (266): n equals a,t,g, or c
ggcacgagnaaancccagcngnctatacttagcattntntaaatccantntcaaatnccaaatatcacagacaccnctnacacaaggaatataaaanccaccaccctncagcctgggagaacgtcgtngagaacctacatctatacangattttaaaaatgaagctgggcgtggtggtacacacctgtggtcccagcttactagggnggctgcagccaggtntgnacgctccaanccagggcttagtggctgcaatgagctcttanttggcatc

SEQ ID NO: 676 - DNA, 416 bp, Homo sapiens
  misc_feature (99): n equals a,t,g, or c
  misc_feature (102): n equals a,t,g, or c
  misc_feature (306): n equals a,t,g, or c
  misc_feature (322): n equals a,t,g, or c
  misc_feature (344): n equals a,t,g, or c
  misc_feature (369): n equals a,t,g, or c
  misc_feature (387): n equals a,t,g, or c
  misc_feature (393): n equals a,t,g, or c
ggcacagtctatttagaactgaggggtttcccaaggactatgggcatggccaagaataagctggtgaaatcagatccagggactcaacaactgattctntgnttctttctttctctctccagagtcttcttcccaccctgggcagggatgcacacggctgcagcgctggtgtcgggccaagcagatgggcttggagcctcccccagaggtgtggcaggtgctgaagacccaccccggaggacccccgcttccagtgcaggtcagagacaggccgggagggctttcaggggagccagggcctttttncaggcatgttcacccngctgttcctgacctgagggagnaatggttggagggtttggaagggcnttgtttgaacaggcaagnagtttnttttgaggtggcctggtttcagg

SEQ ID NO: 677 - DNA, 507 bp, Homo sapiens
  misc_feature (2): n equals a,t,g, or c
  misc_feature (38): n equals a,t,g, or c
  misc_feature (40): n equals a,t,g, or c
  misc_feature (41): n equals a,t,g, or c
  misc_feature (98): n equals a,t,g, or c
  misc_feature (106): n equals a,t,g, or c
  misc_feature (112): n equals a,t,g, or c
  misc_feature (172): n equals a,t,g, or c
  misc_feature (197): n equals a,t,g, or c
  misc_feature (214): n equals a,t,g, or c
  misc_feature (287): n equals a,t,g, or c
  misc_feature (291): n equals a,t,g, or c
  misc_feature (322): n equals a,t,g, or c
  misc_feature (362): n equals a,t,g, or c
  misc_feature (380): n equals a,t,g, or c
  misc_feature (385): n equals a,t,g, or c
  misc_feature (386): n equals a,t,g, or c
  misc_feature (394): n equals a,t,g, or c
  misc_feature (395): n equals a,t,g, or c
  misc_feature (400): n equals a,t,g, or c
  misc_feature (404): n equals a,t,g, or c
  misc_feature (409): n equals a,t,g, or c
  misc_feature (411): n equals a,t,g, or c
  misc_feature (414): n equals a,t,g, or c
  misc_feature (419): n equals a,t,g, or c
  misc_feature (436): n equals a,t,g, or c
  misc_feature (438): n equals a,t,g, or c
  misc_feature (439): n equals a,t,g, or c
  misc_feature (448): n equals a,t,g, or c
  misc_feature (455): n equals a,t,g, or c
  misc_feature (456): n equals a,t,g, or c
  misc_feature (457): n equals a,t,g, or c
  misc_feature (464): n equals a,t,g, or c
  misc_feature (472): n equals a,t,g, or c
  misc_feature (473): n equals a,t,g, or c
  misc_feature (479): n equals a,t,g, or c
  misc_feature (487): n equals a,t,g, or c
  misc_feature (495): n equals a,t,g, or c
anattcggcagagcactttcatcgcctaccccgacgcngnncccagctgcgggacgtgcatcacggctgggcccccagaggagagaggaggccgacgncagcggtncccgtncgggaacgggagggttttcggggggttcggcgtcgcaccttggggccccccgcagccgtntaccgggcctcccatctgctaagcntttttccgttgagccgntccaaaaacactaagctggggacgccaagtgcccccccaccccggctccctggccctatccacaacttcaacnccancccaggatcgccatcttttaggggaggcctnggaagggggtgttaaggtgtttttagggccaacgaggttnaaacaaaaaggacccttncccannccaaccannccaancccnaattnanctncatgncttaggggaaaaatttncnnaacaatttnccctttnnnggaaccngggcaaanncaaggnaagttttnggggtttnaattgtttctta

SEQ ID NO: 678 - DNA, 122 bp, Homo sapiens
  misc_feature (1): n equals a,t,g, or c
  misc_feature (4): n equals a,t,g, or c
  misc_feature (38): n equals a,t,g, or c
  misc_feature (95): n equals a,t,g, or c
  misc_feature (102): n equals a,t,g, or c
  misc_feature (104): n equals a,t,g, or c
  misc_feature (114): n equals a,t,g, or c
ncanaaactctggtccttctgtctggtggcacttaaantcttttgtgccataatgcaacaatatggagggaagattttatggaaaaatggggatnctcttcntnaaccccaatnaattaagg

SEQ ID NO: 679 - DNA, 121 bp, Homo sapiens
  misc_feature (9): n equals a,t,g, or c
  misc_feature (18): n equals a,t,g, or c
  misc_feature (50): n equals a,t,g, or c
  misc_feature (55): n equals a,t,g, or c
  misc_feature (62): n equals a,t,g, or c
  misc_feature (101): n equals a,t,g, or c
  misc_feature (106): n equals a,t,g, or c
acttcgtcnggaactcgngatctccctttgggatggcccgcccgcaggtnccggnccggaantcccgggtcgacccacgcgtccgctatattattggaagnaattntcctctcacctccta

SEQ ID NO: 680 - DNA, 475 bp, Homo sapiens
  misc_feature (5): n equals a,t,g, or c
  misc_feature (83): n equals a,t,g, or c
  misc_feature (122): n equals a,t,g, or c
  misc_feature (130): n equals a,t,g, or c
  misc_feature (137): n equals a,t,g, or c
  misc_feature (178): n equals a,t,g, or c
  misc_feature (203): n equals a,t,g, or c
  misc_feature (271): n equals a,t,g, or c
  misc_feature (301): n equals a,t,g, or c
  misc_feature (330): n equals a,t,g, or c
  misc_feature (333): n equals a,t,g, or c
  misc_feature (340): n equals a,t,g, or c
  misc_feature (343): n equals a,t,g, or c
  misc_feature (390): n equals a,t,g, or c
  misc_feature (399): n equals a,t,g, or c
  misc_feature (441): n equals a,t,g, or c
  misc_feature (458): n equals a,t,g, or c
  misc_feature (463): n equals a,t,g, or c
ggcanagtgcaacacaggaagtgaggatacttctggcgagcgccggttgctgtttcttctcaggctcagggaccggccgcggncccgtagtgtatttaactcaaatgggtgatgaaaaggtnctcttggnaaagtgnaaaactttagatggaaattcttcagggaaaagaaacgaggnaaggaacaagaggagaaagcagagntaaaacgcttaaaaaattctgatgaccgggattccaagcgggattcccttgaggagggggagctgagngattcactgccatggagatcacaataaggnactccccgtatagaagagaagacttcatnggnagacagnggnggaagaagttggtttctttggccatcaaaccaccccggcaaatgttnttggaaagnaaaagttccttcccggaaagttgaaaaggggaaaggaaaatntgggcttctggcctttngccgngggttccagggg

SEQ ID NO: 681 - DNA, 421 bp, Homo sapiens
  misc_feature (349): n equals a,t,g, or c
  misc_feature (377): n equals a,t,g, or c
gtagaattctgagcactcaactcatgtttggcattttaaagtaaaaacaagtgtgacttcgaggaccaaagaaattgtcagctatacatttatctttatgaactcatttatattcctttttaatgactcgttgttctaacatttcctagaagtgttcttataaaggtctaatgtatccacaggctgttgtcttattagtaaatgcaaagaaatgactttgtctgttttactctagtctttagtacttcaaaattacctttcatatccatgatctgagtccattgggggattttaagaattgatgtattcaatacacgttcaaaataaatgtttaatttagtatgagtangtagttcccgaagtggtcccattaaatnataaaccatgtaacttgtctgtgaaaaaaaaaaaaaaaacccgg

SEQ ID NO: 682 - DNA, 118 bp, Homo sapiens
  misc_feature (1): n equals a,t,g, or c
  misc_feature (54): n equals a,t,g, or c
  misc_feature (57): n equals a,t,g, or c
  misc_feature (59): n equals a,t,g, or c
  misc_feature (62): n equals a,t,g, or c
  misc_feature (101): n equals a,t,g, or c
nacctccacgtcctggtgtgtgagcctgactggggtcgaagaccagacaggacntgnantancctgctctgagcgagtgagatcctactggatcatcattnacctaaaccccaagcag

SEQ ID NO: 683 - DNA, 485 bp, Homo sapiens
  misc_feature (164): n equals a,t,g, or c
  misc_feature (245): n equals a,t,g, or c
  misc_feature (313): n equals a,t,g, or c
  misc_feature (332): n equals a,t,g, or c
  misc_feature (337): n equals a,t,g, or c
  misc_feature (339): n equals a,t,g, or c
  misc_feature (363): n equals a,t,g, or c
  misc_feature (367): n equals a,t,g, or c
  misc_feature (376): n equals a,t,g, or c
  misc_feature (378): n equals a,t,g, or c
  misc_feature (412): n equals a,t,g, or c
  misc_feature (445): n equals a,t,g, or c
  misc_feature (455): n equals a,t,g, or c
  misc_feature (479): n equals a,t,g, or c
  misc_feature (481): n equals a,t,g, or c
cctctccgccccctccgggcttggctctcccaggaggctacgactggagccactggtcccgcaggatccccgcgtcctcggtcgccgcgtccacgtccctctcgcgtccccgcccggcgccacgccgcctcctctgggttcggcctccgcgcggtgcagcgcantctcaggccgcgggacaagcccgacttaaatctctgcaatggctaacgaacttatccttgtccgtgttgacttggccacanattgattatggaaggctaggcgtgaattcaattccaacaatcaaggttatttcacaatcccctttgangcaggcaactgtaatgtcntccanantatttggtggcattgcccatacanattntactgaatnantccggaatgataccaacatgtcccaatctttttngggaaacttggacccctggaatgtcttctcctnatggtgaaanaaatccaaaaaaaaaaaaatgttntnaatt

SEQ ID NO: 684 - DNA, 527 bp, Homo sapiens
  misc_feature (308): n equals a,t,g, or c
  misc_feature (401): n equals a,t,g, or c
  misc_feature (457): n equals a,t,g, or c
  misc_feature (479): n equals a,t,g, or c
  misc_feature (506): n equals a,t,g, or c
  misc_feature (512): n equals a,t,g, or c
  misc_feature (520): n equals a,t,g, or c
tttcggccggcgccgccagttcctggggcacacccagaggtccccttctcgccgccgcctgcaactgcgagggtagcccggggccgcttggagtcgcccggacctgagaggctgctgcactgggcctcagccagccctccggatgctggtgctgccatccccctgccctcagcctctggcattttcctccgttgagaccatggagggccctccccgtcggacttgccgctccccagaacctgggaccttcctcctccatcggattctccccaggctttcatcttcttccaagggcccaaccactaacntgctttattggacattcagggtgttccctgacacagtggttggtgggacgaggagtcacagaggggagccaggggccagtgggggttccaggncagaaaaattggttacagttgcccgtgtggtcaagggtctttcgagtaaatgttcntaattttaagggacacagcatnaaccaattgggagttaaaagccttcgnatgtgnaatttgtngggaagg

SEQ ID NO: 685 - DNA, 125 bp, Homo sapiens
  misc_feature (1): n equals a,t,g, or c
  misc_feature (19): n equals a,t,g, or c
  misc_feature (24): n equals a,t,g, or c
  misc_feature (33): n equals a,t,g, or c
  misc_feature (36): n equals a,t,g, or c
  misc_feature (105): n equals a,t,g, or c
  misc_feature (124): n equals a,t,g, or c
  misc_feature (125): n equals a,t,g, or c
nccacctcggtgcagccgntctanaactagtgnatncccgggctgcaggaattcggcacgagcgtgcaagacagctgggtgtacagcgtcctcgaaaccacgagnaagtgagcagatcctccgnn

SEQ ID NO: 686 - DNA, 534 bp, Homo sapiens
  misc_feature (7): n equals a,t,g, or c
  misc_feature (88): n equals a,t,g, or c
  misc_feature (122): n equals a,t,g, or c
  misc_feature (199): n equals a,t,g, or c
  misc_feature (273): n equals a,t,g, or c
  misc_feature (276): n equals a,t,g, or c
  misc_feature (308): n equals a,t,g, or c
  misc_feature (322): n equals a,t,g, or c
  misc_feature (369): n equals a,t,g, or c
  misc_feature (375): n equals a,t,g, or c
  misc_feature (378): n equals a,t,g, or c
  misc_feature (410): n equals a,t,g, or c
  misc_feature (423): n equals a,t,g, or c
  misc_feature (433): n equals a,t,g, or c
  misc_feature (436): n equals a,t,g, or c
  misc_feature (454): n equals a,t,g, or c
  misc_feature (502): n equals a,t,g, or c
  misc_feature (508): n equals a,t,g, or c
  misc_feature (509): n equals a,t,g, or c
tcgagtntttttttttttttttttttttctggatggaatttttaatttatttatcatgtttgtaagttacagacatttatgttttcancaacagtttataatagttacatctcatacttcanctattacaacagagagaacattaaagtacaaagaaagacttcaaaaatgaggttactgtgatgtatcataaaagganttaaaattcaaaatatcaaagacctcacctatcggactaaacataaatcttaaaacctcctatggtcctctganccnaaaattacaaaacttagcaactgcttaaaccntaggaattaacggntctgtgttttccaggtaagaaaaacaaaaaatgctttggtaaactancccatnatntagtttaaatgtttctgccccgttttgtatcnctccttgaaaganagtatataanttncaggccagcatatatttnaaaaaacatctcccaaatttcatttactataggtttctccaataatcntttacnnttttaatccaatgaaaaaaattgat

SEQ ID NO: 687 - DNA, 308 bp, Homo sapiens
gccacagaaccctctaaatccccttgtaaatttaactgttagtccaaagaggaacagctctttggacactaggaaaaaaccttgtagagagagtaaaaaatttaacacccatagtaggcctaaaagcagccaccaattaagaaagcgttcaagctcaacacccactacctaaaaaatcccaaacatataactgaactcctcacacccaattggaccaatctatcaccctatagaaagaactaatgttagtataagtaacatgaaaacattctcctccgcataagcctgcgtcagattaaaacactgaa

SEQ ID NO: 688 - DNA, 676 bp, Homo sapiens
  misc_feature (26): n equals a,t,g, or c
  misc_feature (27): n equals a,t,g, or c
  misc_feature (140): n equals a,t,g, or c
  misc_feature (150): n equals a,t,g, or c
  misc_feature (151): n equals a,t,g, or c
  misc_feature (155): n equals a,t,g, or c
  misc_feature (157): n equals a,t,g, or c
  misc_feature (159): n equals a,t,g, or c
  misc_feature (160): n equals a,t,g, or c
  misc_feature (161): n equals a,t,g, or c
  misc_feature (162): n equals a,t,g, or c
  misc_feature (165): n equals a,t,g, or c
  misc_feature (167): n equals a,t,g, or c
  misc_feature (168): n equals a,t,g, or c
  misc_feature (169): n equals a,t,g, or c
  misc_feature (176): n equals a,t,g, or c
  misc_feature (177): n equals a,t,g, or c
  misc_feature (180): n equals a,t,g, or c
  misc_feature (193): n equals a,t,g, or c
  misc_feature (207): n equals a,t,g, or c
  misc_feature (219): n equals a,t,g, or c
  misc_feature (223): n equals a,t,g, or c
  misc_feature (237): n equals a,t,g, or c
  misc_feature (246): n equals a,t,g, or c
  misc_feature (262): n equals a,t,g, or c
  misc_feature (291): n equals a,t,g, or c
  misc_feature (292): n equals a,t,g, or c
  misc_feature (300): n equals a,t,g, or c
  misc_feature (307): n equals a,t,g, or c
  misc_feature (310): n equals a,t,g, or c
  misc_feature (316): n equals a,t,g, or c
  misc_feature (339): n equals a,t,g, or c
  misc_feature (361): n equals a,t,g, or c
  misc_feature (368): n equals a,t,g, or c
  misc_feature (394): n equals a,t,g, or c
  misc_feature (413): n equals a,t,g, or c
  misc_feature (414): n equals a,t,g, or c
  misc_feature (415): n equals a,t,g, or c
  misc_feature (428): n equals a,t,g, or c
  misc_feature (429): n equals a,t,g, or c
  misc_feature (432): n equals a,t,g, or c
  misc_feature (448): n equals a,t,g, or c
  misc_feature (454): n equals a,t,g, or c
  misc_feature (471): n equals a,t,g, or c
  misc_feature (481): n equals a,t,g, or c
  misc_feature (514): n equals a,t,g, or c
  misc_feature (518): n equals a,t,g, or c
  misc_feature (520): n equals a,t,g, or c
  misc_feature (523): n equals a,t,g, or c
  misc_feature (524): n equals a,t,g, or c
  misc_feature (534): n equals a,t,g, or c
  misc_feature (553): n equals a,t,g, or c
  misc_feature (562): n equals a,t,g, or c
  misc_feature (582): n equals a,t,g, or c
  misc_feature (589): n equals a,t,g, or c
  misc_feature (593): n equals a,t,g, or c
  misc_feature (609): n equals a,t,g, or c
  misc_feature (629): n equals a,t,g, or c
  misc_feature (640): n equals a,t,g, or c
  misc_feature (643): n equals a,t,g, or c
  misc_feature (656): n equals a,t,g, or c
  misc_feature (664): n equals a,t,g, or c
  misc_feature (670): n equals a,t,g, or c
  misc_feature (673): n equals a,t,g, or c
  misc_feature (675): n equals a,t,g, or c
ggttttagagaaaacaaattgaagcnnatcaaatttgtaaaatcaaattacatatatataaaaaaacctatctgtattagacaaaaactgtttttatttatttctgtaagatatccattaaataaatattttagtggaanaaaaaaaaannaaantnannnnaanannnaaaatannaanaagggcggccgcnctaaaggatccaancttacgttcgcntgcntgcaacgtcatacntctcctatnttgtcacctaatttcnatcccctggccgtctttttacaaccttcnngactgggnaaatccnctngcgttncccaacttaaaccgccttgcaantacatccccttttcgccagctnggcgttntttctaaaaaagcccgcatccgatcncccttcccaattagttgcnnnccctttaattggnnaantggggacccccctgtnttcggntccttttaatcttcggnggggtggtgnttgggtttaccctccacctttgaacctttatanttgncnatnnccccaaatcncccgctcctttccgctttncttcccttncctttctccctctctttccnccgggtntccnccgttctaatttttantcggggggctccttttaggnttccaattttntgnttatcgggtcccnccaacccnttaatntcntnt

SEQ ID NO: 689 - DNA, 195 bp, Homo sapiens
  misc_feature (14): n equals a,t,g, or c
  misc_feature (154): n equals a,t,g, or c
  misc_feature (159): n equals a,t,g, or c
  misc_feature (160): n equals a,t,g, or c
  misc_feature (194): n equals a,t,g, or c
  misc_feature (195): n equals a,t,g, or c
ggcacgaggctgcnccagagtttggaaggaagatcgaggcagaagatgtagaaggaagctgtgggggtgggagtgatgcctcaggaacaaaactgaggaattccctaacggacccagtccctagggaaagaggctcccctcaggctctccttgnctagnnccacacctggcagagcctgtcacccagcctagcnn

SEQ ID NO: 690 - DNA, 283 bp, Homo sapiens
  misc_feature (7): n equals a,t,g, or c
  misc_feature (34): n equals a,t,g, or c
  misc_feature (42): n equals a,t,g, or c
  misc_feature (105): n equals a,t,g, or c
  misc_feature (139): n equals a,t,g, or c
  misc_feature (183): n equals a,t,g, or c
  misc_feature (224): n equals a,t,g, or c
  misc_feature (257): n equals a,t,g, or c
  misc_feature (265): n equals a,t,g, or c
  misc_feature (266): n equals a,t,g, or c
  misc_feature (279): n equals a,t,g, or c
ctcattnatttgcaactgtcatggatgtttacangaacccanccagagtttgcctccctgcacttcatcccaaagcgcacctgcttcctccacttcaccttcggnagaagacacttcaaactgcggacacacgcaaaancaactcccagctctgtttgatgttactcgtttcctcaacaagtnggcaaaacagatatcatgctgaattccgggggccctgtgantcaaaatcacttcttttttaagcaattgaaaanctgcaggnnggtgctctttgcnactg

SEQ ID NO: 691 - DNA, 494 bp, Homo sapiens
  misc_feature (140): n equals a,t,g, or c
  misc_feature (163): n equals a,t,g, or c
  misc_feature (200): n equals a,t,g, or c
  misc_feature (234): n equals a,t,g, or c
  misc_feature (238): n equals a,t,g, or c
  misc_feature (272): n equals a,t,g, or c
  misc_feature (286): n equals a,t,g, or c
  misc_feature (290): n equals a,t,g, or c
  misc_feature (311): n equals a,t,g, or c
  misc_feature (325): n equals a,t,g, or c
  misc_feature (332): n equals a,t,g, or c
  misc_feature (336): n equals a,t,g, or c
  misc_feature (343): n equals a,t,g, or c
  misc_feature (346): n equals a,t,g, or c
  misc_feature (348): n equals a,t,g, or c
  misc_feature (361): n equals a,t,g, or c
  misc_feature (368): n equals a,t,g, or c
  misc_feature (385): n equals a,t,g, or c
  misc_feature (387): n equals a,t,g, or c
  misc_feature (390): n equals a,t,g, or c
  misc_feature (407): n equals a,t,g, or c
  misc_feature (437): n equals a,t,g, or c
  misc_feature (438): n equals a,t,g, or c
  misc_feature (478): n equals a,t,g, or c
  misc_feature (490): n equals a,t,g, or c
gtggaaacgtgctatttggaggttattttcctagtcgacatccaggagatctccagagatctatttcagccccacctgttgatttcatcatgaaaaggaggaagctcaaactgaagtgagttaaaaacttcatctcctanagaggactgtggctcggcctganttgagtttttttatgtttatgtgcaagcgcaatgaanaagaacacccgccagactaccatgaggatcaatnagcnagatgctctctgcaccccacactcccatgaaccnaagaagatcttccnaatntttttgatgaaggaaaaattntgccccctttggtntcttccncccntgttttnaananccattttattccngcttccnccccccaaaaacccccntnttnaatgcttcctggcccanccttaaaacctggtggcccaaaaaaaaaannaaaccccttttaaaattttccctaaatctccccccggggnaaaaaatttggncccc

SEQ ID NO: 692 - DNA, 138 bp, Homo sapiens
  misc_feature (11): n equals a,t,g, or c
  misc_feature (26): n equals a,t,g, or c
  misc_feature (33): n equals a,t,g, or c
  misc_feature (60): n equals a,t,g, or c
  misc_feature (74): n equals a,t,g, or c
  misc_feature (109): n equals a,t,g, or c
  misc_feature (133): n equals a,t,g, or c
  misc_feature (138): n equals a,t,g, or c
gtggtagagtnctgttaaatgaatgntctgggntagatacagcttggagaacctgctggncttgttagacagcncttgggcctttgccagcagcaagaggtgaagcganccactcttcccccttcccctcccncctgn

SEQ ID NO: 693 - DNA, 456 bp, Homo sapiens
  misc_feature (17): n equals a,t,g, or c
  misc_feature (22): n equals a,t,g, or c
  misc_feature (42): n equals a,t,g, or c
  misc_feature (43): n equals a,t,g, or c
  misc_feature (45): n equals a,t,g, or c
  misc_feature (46): n equals a,t,g, or c
  misc_feature (47): n equals a,t,g, or c
  misc_feature (53): n equals a,t,g, or c
  misc_feature (62): n equals a,t,g, or c
  misc_feature (64): n equals a,t,g, or c
  misc_feature (74): n equals a,t,g, or c
  misc_feature (123): n equals a,t,g, or c
  misc_feature (138): n equals a,t,g, or c
  misc_feature (168): n equals a,t,g, or c
  misc_feature (175): n equals a,t,g, or c
  misc_feature (187): n equals a,t,g, or c
  misc_feature (193): n equals a,t,g, or c
  misc_feature (236): n equals a,t,g, or c
  misc_feature (246): n equals a,t,g, or c
  misc_feature (255): n equals a,t,g, or c
  misc_feature (257): n equals a,t,g, or c
  misc_feature (276): n equals a,t,g, or c
  misc_feature (282): n equals a,t,g, or c
  misc_feature (291): n equals a,t,g, or c
  misc_feature (292): n equals a,t,g, or c
  misc_feature (303): n equals a,t,g, or c
  misc_feature (305): n equals a,t,g, or c
  misc_feature (316): n equals a,t,g, or c
  misc_feature (319): n equals a,t,g, or c
  misc_feature (338): n equals a,t,g, or c
  misc_feature (340): n equals a,t,g, or c
  misc_feature (356): n equals a,t,g, or c
  misc_feature (382): n equals a,t,g, or c
  misc_feature (392): n equals a,t,g, or c
  misc_feature (406): n equals a,t,g, or c
  misc_feature (425): n equals a,t,g, or c
  misc_feature (428): n equals a,t,g, or c
gcacagtcctgcccttnatgcncagccccatgggacacccgnngnnntttccnaaacctccngnaaaacacacntggagccagagccttctgccgccagccctgcccctgaattggaagcagncctgtgctcgatggnaggggctcccaggccggcagcccttgccancttcctntgccaagcctgntgctgnagaacggttattgctgaggtgcccctgtccaggcctgctaacnttggccacanacacatatnangcccttggcttacagcctnaacctnggcttcacnnctgctggccancnagactgcttcntgncagcattgatcttgtgttnancaagtctcactggcanagctggcattggagggtgcttgtccntggactttgntcagaggcctgtgncagagtcagtttgaactcnttnatgcatgctctgggcctgagttgcagca

SEQ ID NO: 694 - DNA, 104 bp, Homo sapiens
  misc_feature (11): n equals a,t,g, or c
  misc_feature (53): n equals a,t,g, or c
  misc_feature (78): n equals a,t,g, or c
  misc_feature (92): n equals a,t,g, or c
  misc_feature (98): n equals a,t,g, or c
ggaaatttgtnggggggctgccaaaacctgaacaagaagatggcgccaacaangcattctcagactcctttgtggatncttgccctgaaggngaaggncagagg

SEQ ID NO: 695 - DNA, 426 bp, Homo sapiens
  misc_feature (5): n equals a,t,g, or c
  misc_feature (7): n equals a,t,g, or c
  misc_feature (54): n equals a,t,g, or c
  misc_feature (68): n equals a,t,g, or c
  misc_feature (85): n equals a,t,g, or c
  misc_feature (132): n equals a,t,g, or c
  misc_feature (137): n equals a,t,g, or c
  misc_feature (188): n equals a,t,g, or c
  misc_feature (219): n equals a,t,g, or c
  misc_feature (227): n equals a,t,g, or c
  misc_feature (281): n equals a,t,g, or c
  misc_feature (300): n equals a,t,g, or c
  misc_feature (369): n equals a,t,g, or c
  misc_feature (370): n equals a,t,g, or c
  misc_feature (396): n equals a,t,g, or c
  misc_feature (414): n equals a,t,g, or c
  misc_feature (422): n equals a,t,g, or c
ggaancnctggttttaaatattttgacttgttgagggtatgttttatatagcangacattatatagcngtaaaaaatggtgtttnatcttctatataattcctgtttttattattaacaaaacagtcctaantagcngccctcaattgtgaaaaaatttactttaaactacattaggttgtgaatgcnggttttatcagaactatgttttttgttcagnttatctgntcatatggataaatattggttgggatgacttggtgtctaatgtgtagtgctacncacctaacttatggggccnaaatagcatgtcctaatgcttgctgctgatttaaacacattaaaggtactttgcaggaaaaaaaaattnntaagggcggccgctctagaggatccnagcttacgtacgcgtgcntgcgacgncata

SEQ ID NO: 696 - DNA, 196 bp, Homo sapiens
  misc_feature (130): n equals a,t,g, or c
  misc_feature (139): n equals a,t,g, or c
  misc_feature (157): n equals a,t,g, or c
  misc_feature (184): n equals a,t,g, or c
  misc_feature (196): n equals a,t,g, or c
tcgacccacgcgtccgatttaatgcactaactttaaatgttttccaaatataattacctgtcagtctttttatagatataaatcaagtaggcattatgttttaaaagactgacaggtaattatatttggnaaacatttnatgcactaactttaaagnaattgaaaattcaggtggataaatagncttacaaaagan

SEQ ID NO: 697 - DNA, 263 bp, Homo sapiens
  misc_feature (43): n equals a,t,g, or c
  misc_feature (210): n equals a,t,g, or c
  misc_feature (211): n equals a,t,g, or c
  misc_feature (225): n equals a,t,g, or c
  misc_feature (237): n equals a,t,g, or c
  misc_feature (253): n equals a,t,g, or c
gaacttccccttcccgcaagtgtgaggaaccccaggctcactnatgctcctctgccccctctttaacattttcccctggacaagtgtgtatctgttctctccattggcatttctacttccagcctctgggctcctgcttctgcctcctgcttaggaacctgtccccctggggtagcttcacaacaccttcaaacataggcagtcagaggnncacccgagaagggnccttcccacgtncaggaccaaatttctnccgggaattt

SEQ ID NO: 698 - DNA, 508 bp, Homo sapiens
  misc_feature (358): n equals a,t,g, or c
  misc_feature (449): n equals a,t,g, or c
  misc_feature (480): n equals a,t,g, or c
  misc_feature (496): n equals a,t,g, or c
  misc_feature (499): n equals a,t,g, or c
  misc_feature (505): n equals a,t,g, or c
gcggacgcgtgggtaaagctgcacttgggatttttacctaacgctttactgattctctcaagcacatggcaaagtttgatttgcactccgttcatttctgacacgttttgctgcctcctacctttctaagcgtcatgcaaattcgagaatggagaaggacgctgccggtccctgagcggtgtggagagggcggaaggtggactccagcgcagcttgaggggctgaggacggaggctgcagcatctgtgtcgttctactgagcacgcttctctgcctcgctcctgactcagcactttgttcactggctcagcagttatgtttacacatcatttttatggtcctgctttgtaattcatgnttgagatgggtggccactgtacagatatttattacgcttttcagactttctgaatagatttttttgaataaacatgggtttatgaaagtgnaaaaaaaaaaaaaaaaggggggcccttttanaggatccaagtttacnacncgggcntgg

SEQ ID NO: 699 - DNA, 651 bp, Homo sapiens
  misc_feature (499): n equals a,t,g, or c
  misc_feature (502): n equals a,t,g, or c
  misc_feature (550): n equals a,t,g, or c
  misc_feature (588): n equals a,t,g, or c
  misc_feature (596): n equals a,t,g, or c
  misc_feature (611): n equals a,t,g, or c
  misc_feature (614): n equals a,t,g, or c
  misc_feature (643): n equals a,t,g, or c
gcaataaagctaaaactcacctgagttgtaaaaaactccagttgacacaaaatagactacgaaagtggctttaacatatctgaacacacaatagctaagacccaaactgggattagataccccactatgcttagccctaaacctcaacagttaaatcaacaaaactgctcgccagaacactacgagccacagcttaaaactcaaaggacctggcggtgcttcatatccctctagaggagcctgttctgtaatcgataaaccccgatcaacctcaccacctcttgctcagcctatataccgccatcttcagcaaaccctgatgaaggctacaaagtaagcgcaagtacccacgtaaagacgttaggtcaaggtgtagcccatgaggtggcaagaaatgggctacattttctaccccagaaaactacgatagcccttatgaaacttaagggtcgaaggtggatttagcagtaaactgagagtagagtgcttagttgaacanggncctgaacgcgacacaccgccgtacccttctcaggatacttcaaggacnttactaaacccctacgcattatttgaggagacagtcgnaacatggnagtgacctggaaagngcncttggacaaccaaaaaaaaaaaaaaaaanggggggcc

SEQ ID NO: 700 - DNA, 787 bp, Homo sapiens
  misc_feature (5): n equals a,t,g, or c
  misc_feature (33): n equals a,t,g, or c
  misc_feature (58): n equals a,t,g, or c
  misc_feature (99): n equals a,t,g, or c
  misc_feature (109): n equals a,t,g, or c
  misc_feature (116): n equals a,t,g, or c
  misc_feature (126): n equals a,t,g, or c
  misc_feature (127): n equals a,t,g, or c
  misc_feature (130): n equals a,t,g, or c
  misc_feature (147): n equals a,t,g, or c
  misc_feature (152): n equals a,t,g, or c
  misc_feature (163): n equals a,t,g, or c
  misc_feature (181): n equals a,t,g, or c
  misc_feature (184): n equals a,t,g, or c
  misc_feature (186): n equals a,t,g, or c
  misc_feature (211): n equals a,t,g, or c
  misc_feature (215): n equals a,t,g, or c
  misc_feature (233): n equals a,t,g, or c
  misc_feature (236): n equals a,t,g, or c
  misc_feature (248): n equals a,t,g, or c
  misc_feature (252): n equals a,t,g, or c
  misc_feature (260): n equals a,t,g, or c
  misc_feature (267): n equals a,t,g, or c
  misc_feature (271): n equals a,t,g, or c
  misc_feature (284): n equals a,t,g, or c
  misc_feature (288): n equals a,t,g, or c
  misc_feature (301): n equals a,t,g, or c
  misc_feature (304): n equals a,t,g, or c
  misc_feature (305): n equals a,t,g, or c
  misc_feature (351): n equals a,t,g, or c
  misc_feature (364): n equals a,t,g, or c
  misc_feature (373): n equals a,t,g, or c
  misc_feature (408): n equals a,t,g, or c
  misc_feature (416): n equals a,t,g, or c
  misc_feature (446): n equals a,t,g, or c
  misc_feature (504): n equals a,t,g, or c
  misc_feature (525): n equals a,t,g, or c
  misc_feature (534): n equals a,t,g, or c
  misc_feature (536): n equals a,t,g, or c
  misc_feature (589): n equals a,t,g, or c
  misc_feature (601): n equals a,t,g, or c
  misc_feature (608): n equals a,t,g, or c
  misc_feature (614): n equals a,t,g, or c
  misc_feature (626): n equals a,t,g, or c
  misc_feature (628): n equals a,t,g, or c
  misc_feature (649): n equals a,t,g, or c
  misc_feature (653): n equals a,t,g, or c
  misc_feature (665): n equals a,t,g, or c
  misc_feature (726): n equals a,t,g, or c
  misc_feature (737): n equals a,t,g, or c
  misc_feature (747): n equals a,t,g, or c
  misc_feature (758): n equals a,t,g, or c
  misc_feature (777): n equals a,t,g, or c
taaangggggggggggggggggggaaatttgantttgaaaaggggggggggggggaancttttttttaaggggggggggggggggaaaaaaaagtaaangggggggggnggggaancttttttttnnccnccatcaagggggggaantttantttttggggtnaacaaacccttgcccccnggntnaccccggggttccccggggaaaaantttncccccggggggttccggnaancccttattgccngttncccggggnttttttncccnaaaaaaaacaaantttntttccccttttgnccnnttttaacttgggccgcctttgcccaaaagggctttggggggggccnaaagggtcaattncccttgaancttgaaaccggggaaaagcttcaactttggcattnggcccttnccgtggtccccacttgcaaacgtggtcaantgggtgggaacctgaacttgccgtctaaaaaaaaacttgccaaatattgaatgaacantcaaaaaaaggtgggtgaaancaagcctcngnaaggcccccttcaaaaggcaatcttggcttacacttaacaccaaggtggtctncttttgactttnaacaagngaacanccacttcttcancntttaacgcttggggcttgcanttgnccttcaaccaancacttttgtcaaagctcaattttcttgggtattaacaaaaccaaaattttggcttacagcnaacaaagggtngggtgggaancctcaatgggnccccaacaattgggccctnccaaagggaa

SEQ ID NO: 701 - DNA, 133 bp, Homo sapiens
  misc_feature (109): n equals a,t,g, or c
  misc_feature (119): n equals a,t,g, or c
  misc_feature (125): n equals a,t,g, or c
  misc_feature (126): n equals a,t,g, or c
  misc_feature (128): n equals a,t,g, or c
ggaagaggatgacaccatcatggaagaattggtagataatcatggcaaaaaaatcaagtcttagaaataaagtgccattctctgaaaaaaaaaaaaaaaaaaaaaaaanggggggcccnttttanngnaccca

SEQ ID NO: 702 - DNA, 447 bp, Homo sapiens
  misc_feature (4): n equals a,t,g, or c
  misc_feature (7): n equals a,t,g, or c
  misc_feature (382): n equals a,t,g, or c
  misc_feature (413): n equals a,t,g, or c
  misc_feature (424): n equals a,t,g, or c
  misc_feature (439): n equals a,t,g, or c
  misc_feature (445): n equals a,t,g, or c
gcgnatncgtgggctgaagcataaagaattaatgacttactttaattactggaattcttctgcaacatttgacaaaactaaccttgaataaggcccactgtaatacgtagctctcttaaatataacacttaggactagaagattagaaactaccaatcccaactacgtaataggaaaatgtaggatcaaaaggcccatgtatataagtactgaccactgggccataatgttgcttctcaggctatatgcagtcctttagtcagaagtcaataggcctatttattaatattttacagaccatattacctggattaccagggactatctttgctgcagagatcaagggttaagatctatgggaagatacttatttttctgaggnccttatgcctggcatataattaaagactcangagaattatgngaaatgctttctggntgcccnaa

SEQ ID NO: 703 - DNA, 349 bp, Homo sapiens
  misc_feature (117): n equals a,t,g, or c
  misc_feature (214): n equals a,t,g, or c
  misc_feature (225): n equals a,t,g, or c
  misc_feature (272): n equals a,t,g, or c
  misc_feature (295): n equals a,t,g, or c
  misc_feature (311): n equals a,t,g, or c
  misc_feature (322): n equals a,t,g, or c
  misc_feature (328): n equals a,t,g, or c
ccctaatgtaaaatatggactttggtgatagcgatgtgtcagtgtatgttcatcaattgtaataaacattcctttctggtggggaggttgtaaatgggggagggtgtgcatgtgtangggcacgagttatatgggaattctctgtaccttctgttcaattttgctatgaacctaaaactgctctaaaaaataacctctgctttaaaaaggtatntgtactctatnatcttttattagaaatctttgttgctatttttacatggaaaaatacnggatgaagtccttattcccctanaataaattatggaaantcaccattccnagtttntgatggaatcctggatgctcc

SEQ ID NO: 704 - DNA, 328 bp, Homo sapiens
  misc_feature (160): n equals a,t,g, or c
  misc_feature (228): n equals a,t,g, or c
  misc_feature (263): n equals a,t,g, or c
  misc_feature (276): n equals a,t,g, or c
  misc_feature (302): n equals a,t,g, or c
  misc_feature (305): n equals a,t,g, or c
  misc_feature (310): n equals a,t,g, or c
cgcaccggaccccggtcccggcgcgcggcggggcacgcgccctcccgcgcgcgcggggcgcgtggaggggggggcggcccgccggcggggacaggcgggggaccggctatccgaggccaaccgaggctccgcggcgctgccgtatcgttccgcctgggcnggattctgacttagaggcgttcagtcataatcccacagatggtagcttcgccccattggctcctcagncaagcacatacaccaaatgtctgaacctgcggttnctctcgtactgancaggattaccatggcaacaacacatnatnagtanggtaaaactaacctgtct

SEQ ID NO: 705 - DNA, 666 bp, Homo sapiens
  misc_feature (395): n equals a,t,g, or c
  misc_feature (437): n equals a,t,g, or c
  misc_feature (443): n equals a,t,g, or c
  misc_feature (456): n equals a,t,g, or c
  misc_feature (468): n equals a,t,g, or c
  misc_feature (473): n equals a,t,g, or c
  misc_feature (478): n equals a,t,g, or c
  misc_feature (484): n equals a,t,g, or c
  misc_feature (494): n equals a,t,g, or c
  misc_feature (497): n equals a,t,g, or c
  misc_feature (505): n equals a,t,g, or c
  misc_feature (506): n equals a,t,g, or c
  misc_feature (512): n equals a,t,g, or c
  misc_feature (541): n equals a,t,g, or c
  misc_feature (548): n equals a,t,g, or c
  misc_feature (562): n equals a,t,g, or c
  misc_feature (578): n equals a,t,g, or c
  misc_feature (589): n equals a,t,g, or c
  misc_feature (617): n equals a,t,g, or c
  misc_feature (618): n equals a,t,g, or c
  misc_feature (652): n equals a,t,g, or c
gttttgtccaatcatttaaaacttattatataaaaatttgttttaaatgattggacaaaaaggtatggtctaatggtaataaacaaatttttatataataagttttatttgtatgtaataaattttattatataaaaataagttttaatatatattatataaaaagttttaataaatacctaatatattatttaatatgataaaacttatattaaatgaaattttatgctgttctcttgtcaatctgtcttttgttatcttgctggtgtgcctgtcatgtgagggactgcaatctgatatgcctattttccacagtcaaagcaattacaagagaattgttacaattacccagttatgtcaagagattttttttaattcactaaggtagagataangagaatgtattaaaaataggatattttaattataaatgcatnactggngaaggggtattgnttttgaataaanatatngaggntatttngccatgaccncanaaaaaacnnaagttngaaaaaatcccctgggaaaatttaatgtntccttcnaactttttaaaaantaccctaaaaaaaatnttaatttgganttaaaatcaatatctccaattaatcccnnaattctctttaaataatcccccttaaaataaggntaccccttgaaata

SEQ ID NO: 706 - DNA, 267 bp, Homo sapiens
  misc_feature (6): n equals a,t,g, or c
  misc_feature (24): n equals a,t,g, or c
  misc_feature (28): n equals a,t,g, or c
  misc_feature (36): n equals a,t,g, or c
  misc_feature (43): n equals a,t,g, or c
  misc_feature (62): n equals a,t,g, or c
  misc_feature (75): n equals a,t,g, or c
  misc_feature (78): n equals a,t,g, or c
  misc_feature (79): n equals a,t,g, or c
  misc_feature (95): n equals a,t,g, or c
  misc_feature (130): n equals a,t,g, or c
  misc_feature (147): n equals a,t,g, or c
  misc_feature (155): n equals a,t,g, or c
  misc_feature (156): n equals a,t,g, or c
  misc_feature (192): n equals a,t,g, or c
  misc_feature (208): n equals a,t,g, or c
  misc_feature (222): n equals a,t,g, or c
  misc_feature (256): n equals a,t,g, or c
  misc_feature (258): n equals a,t,g, or c
cccgtncccccctcctcctcggcncgcngcggcggnggcgggnggcggaggggccgcgggcnggtcccccccgcnggnnccgcccccggggccgnggttccggcggcgcctcgcctcggccggcgcctancagccgacttagaactngtgcggannaggggaatccgactgtttaattaaaacaaagcatcncgaaggcccgcggcgngtgttgacgcgatntgatttctgcccagtgctctgaatgtcaagttgnanaaattcaat

SEQ ID NO: 707 - DNA, 300 bp, Homo sapiens
  misc_feature (64): n equals a,t,g, or c
  misc_feature (79): n equals a,t,g, or c
  misc_feature (105): n equals a,t,g, or c
  misc_feature (113): n equals a,t,g, or c
  misc_feature (161): n equals a,t,g, or c
  misc_feature (171): n equals a,t,g, or c
  misc_feature (172): n equals a,t,g, or c
  misc_feature (227): n equals a,t,g, or c
  misc_feature (238): n equals a,t,g, or c
  misc_feature (251): n equals a,t,g, or c
  misc_feature (257): n equals a,t,g, or c
  misc_feature (274): n equals a,t,g, or c
cctccacccacggccgggccttgacgtcatgggctgcggccccctcccggctgaacctataaancggcaggtgcgcgcngccctacagacgttcgcacacctggntgccagcnccccaaaagtcccgggacagcccgaagcgccgcgcccgcagccccganctccccaagnnttcgaaagcggcgcacactcccggtctccactcgctcttccaacacccgctcgtnttggcggcagntcgtgtcccaganaccganttgccccagaaaacganacgccgccgctgcgaaggaccaatga

SEQ ID NO: 708 - DNA, 282 bp, Homo sapiens
  misc_feature (1): n equals a,t,g, or c
  misc_feature (5): n equals a,t,g, or c
  misc_feature (6): n equals a,t,g, or c
  misc_feature (30): n equals a,t,g, or c
  misc_feature (50): n equals a,t,g, or c
  misc_feature (239): n equals a,t,g, or c
  misc_feature (262): n equals a,t,g, or c
  misc_feature (272): n equals a,t,g, or c
  misc_feature (275): n equals a,t,g, or c
  misc_feature (279): n equals a,t,g, or c
ntttnnatagtccccaagcttaatacgaanccctatagggaaagctgaanacgcctgcaggtaccgggtccgggaattcccgggtcgacccacgcgtccgattacaagctgtagaccacctaatatcaatttgtaggtaatgttcctgaaaattgcaatacatttcaattatactaaacctcacaaagtagaggaatccatgtaaattgcaaataaaccactttctaattttaaaaaanaaaaaagaaaaaaaaaaaaaaangggggggccnccntaanggt

SEQ ID NO: 709 - DNA, 399 bp, Homo sapiens
  misc_feature (4): n equals a,t,g, or c
  misc_feature (20): n equals a,t,g, or c
  misc_feature (42): n equals a,t,g, or c
  misc_feature (58): n equals a,t,g, or c
  misc_feature (72): n equals a,t,g, or c
  misc_feature (123): n equals a,t,g, or c
  misc_feature (138): n equals a,t,g, or c
  misc_feature (143): n equals a,t,g, or c
  misc_feature (346): n equals a,t,g, or c
  misc_feature (364): n equals a,t,g, or c
  misc_feature (388): n equals a,t,g, or c
  misc_feature (395): n equals a,t,g, or c
  misc_feature (399): n equals a,t,g, or c
gctnttttatacgaagggcncctaataggggtttaaagctgnaaaacccccctggcanggtagccgcgaaancgggaaattcccgggggtcgaacccacgcgttccgggaaaaagcttgccanaaacagggagaaganagganagaaaaagggggattagttatatcaaaaagcctggaaaggtgggaatggaccaaaaagatggggactcctcctttattccaagcatgggagggggttttaaatgggagggatttcctttttcctgcgacaaaacgtcttttcacaacttaccctgttaagtcaaaatttattttccaggaatttaatatgtactttagttggnattatctatgtcaatganttttaagctatgaaaatatatatnaacttanagan

SEQ ID NO: 710 - DNA, 302 bp, Homo sapiens
  misc_feature (294): n equals a,t,g, or c
  misc_feature (300): n equals a,t,g, or c
ggtgtaattctgttagtttcagatttctctcctgtttttgcaaattgtgggaaagattgacaatgcaaatgtgtcaaagacatactgttgggtgcaatattaacaattttaaatgcaaatttctttggataaattatttctatattctgtaaatctgagatttaatgtatattttgtttaaaaaatgatttagtaaaatctttgaaaagtaaaaaaaaaaaaaaaaaaaaaaaaaaaaaaaaaaaaaaaaaaaaaaaaaaaaaaaaaaaaaaaaaaaaaaaaaaaaaaaaaaanaaaaanaa

SEQ ID NO: 711 - DNA, 489 bp, Homo sapiens
  misc_feature (3): n equals a,t,g, or c
  misc_feature (70): n equals a,t,g, or c
  misc_feature (110): n equals a,t,g, or c
  misc_feature (116): n equals a,t,g, or c
  misc_feature (287): n equals a,t,g, or c
  misc_feature (402): n equals a,t,g, or c
  misc_feature (439): n equals a,t,g, or c
  misc_feature (465): n equals a,t,g, or c
  misc_feature (466): n equals a,t,g, or c
  misc_feature (483): n equals a,t,g, or c
tangggaaatttgaagctggttccctgcaggtcccctgcaggtaccggtccggaattcccgggtcgaccnacgcgtccgggctccacgagggttcagctgtctcttactnttaacnagtgaaattgacctgcccgtgaagaggcgggcataacacagcaagacgagaagaccctatggagctttaatttattaatgcaaacagtacctaacaaacccacaggtcctaaactaccaaacctgcattaaaaatttcggttggggcgacctcggagcagaacccaacctncgagcagtacatgctaagacttcaccagtcaaagcgaactactatactcaattgatccaataacttgaccaacggaacaagttaccctagggataacagcgcaatcctattctanagtccatatcaacaataaggggttacgacctcgatgntggatcaagacattccgatggtgcanncgctattaaagggtcgnttggtt

SEQ ID NO: 712 - DNA, 121 bp, Homo sapiens
  misc_feature (2): n equals a,t,g, or c
  misc_feature (74): n equals a,t,g, or c
  misc_feature (88): n equals a,t,g, or c
  misc_feature (93): n equals a,t,g, or c
  misc_feature (94): n equals a,t,g, or c
  misc_feature (119): n equals a,t,g, or c
gnattggggcttcctttcgagggggccggggactagggatcctgaccacaatgactgagcctgctacatgaagngccccacgtaggtncggannactttgacatcttggtacctagganac

SEQ ID NO: 713 - DNA, 476 bp, Homo sapiens
  misc_feature (337): n equals a,t,g, or c
  misc_feature (420): n equals a,t,g, or c
  misc_feature (436): n equals a,t,g, or c
  misc_feature (450): n equals a,t,g, or c
  misc_feature (458): n equals a,t,g, or c
  misc_feature (463): n equals a,t,g, or c
ggagcaaacatgttttttgaaccttgtcatttttgtgaagaattgcctagattccttctctcatcaacgggaaagtacttcctctgagagtgcgagtgcaccatgctcactgttgctgcgtgggagagtcacaagccactggcaagcaagtggtatagtctgtgaagcactgcagcgagcagcacctggatcttgcctttataagaacattttactacctgcagctttgagtcttgccctacattttgggcatgacataagatgtgtctttattcagctcgtcgtgaagatgctgctgctgaatgggtcagcatatctctgtttgcatggtttgcangaagtcggttttcatggtcattcagtttccacagatcttgaatgattactggctggctgggtctttttttccatgagaaaatnactggtgcaaaattgncctataaaattggnctttactnaaatnaccaatggtttaa

SEQ ID NO: 714 - DNA, 527 bp, Homo sapiens
  misc_feature (9): n equals a,t,g, or c
  misc_feature (16): n equals a,t,g, or c
  misc_feature (79): n equals a,t,g, or c
  misc_feature (80): n equals a,t,g, or c
  misc_feature (414): n equals a,t,g, or c
  misc_feature (415): n equals a,t,g, or c
  misc_feature (419): n equals a,t,g, or c
  misc_feature (462): n equals a,t,g, or c
  misc_feature (469): n equals a,t,g, or c
  misc_feature (483): n equals a,t,g, or c
  misc_feature (497): n equals a,t,g, or c
  misc_feature (516): n equals a,t,g, or c
ccctttgantataccngaaagctggttcgcctgcaggtaccggtccggaattcccgggtcgacccacgcgtccgcccanncccactccaccttactaccagacaaccttagccaaaccatttacccaaataaagtataggcgatagaaattgaaacctggcgcaatagatatagtaccgcaagggaaagatgaaaaattatagccaagcataatatagcaaggactaacccctataccttctgcataatgaattaactagaaataactttgcaaggagagccaaagctaagacccccgaaaccagacgagctacctaagaacagctaaaagagcacacccgtctatgttgcaaaatagtgggaaagatttataggtagaggcgacaaacctacccgagcctggtgatagctggnntgtncaagataagaatcttagttcaacctttaaattttggcccacanaaccctntaaattcccttggnaaattaaccggtangtccaagagggaccaggtnttgggacccct

SEQ ID NO: 715 - DNA, 511 bp, Homo sapiens
  misc_feature (23): n equals a,t,g, or c
  misc_feature (54): n equals a,t,g, or c
gaaacccactccaccttactacntgacaaccttagccaaaccatttacccaagntaaagtataggcgatagaaattgaaacctggcgcaatagatatagtaccgcaagggaaagatgaaaaattatagccaagcataatatagcaaggactaacccctataccttctgcataatgaattaactagaaataactttgcaaggagagccaaagctaagacccccgaaaccagacgagctacctaagaacagctaaaagagcacacccgtctatgtagcaaaatagtgggaagatttataggtagaggcgacaaacctaccgagcctggtgatagctggttgtccaagatagaatcttagttcaactttaaatttgcccacagaaccctctaaatccccttgtaaatttaactgttagtccaaagaggaacagtctttggcactaggaaaaaccttgtagaagagagtaaaaaattaacacccatagtaggcctaaaagcagcaccaattaaga

SEQ ID NO: 716 - DNA, 81 bp, Homo sapiens
  misc_feature (15): n equals a,t,g, or c
  misc_feature (39): n equals a,t,g, or c
  misc_feature (74): n equals a,t,g, or c
  misc_feature (77): n equals a,t,g, or c
gggtggcatgaggangtcccacttgcaacttctttctgntgagagaaccttaggtacggagaagaatagagggnctnatgg

SEQ ID NO: 717 - DNA, 208 bp, Homo sapiens
  misc_feature (2): n equals a,t,g, or c
  misc_feature (6): n equals a,t,g, or c
  misc_feature (20): n equals a,t,g, or c
  misc_feature (71): n equals a,t,g, or c
  misc_feature (72): n equals a,t,g, or c
  misc_feature (104): n equals a,t,g, or c
  misc_feature (115): n equals a,t,g, or c
  misc_feature (127): n equals a,t,g, or c
  misc_feature (175): n equals a,t,g, or c
  misc_feature (195): n equals a,t,g, or c
  misc_feature (201): n equals a,t,g, or c
tnggtncataagcatcttcntggaatcgtattataaaattgaaattagatatagagaatgttttaacactnntttaactcaaaatttgtaatcattcttaatancatctttcttnatcaaaagaaanaggaatttaatgacaggcagacactcttttaaaacttattcacaaaanccaataactgcacaaaatgntattanctgcctg

SEQ ID NO: 718 - DNA, 562 bp, Homo sapiens
  misc_feature (557): n equals a,t,g, or c
gcccacgcgtccggcccaggctgctccctaccaggtgacggagcgcgccggggctgtgggtgccaggggctgagtgctagggactcgtcatgagtggggatccccacgttcctgtcactgctgtcaaacagaaggtaaacagtcttatgaatgtatttccttaggaaaacttgtaaaaacttttattaggatatctatttaatactgaactttggcctactttgtgatagactataaacaaattgaggaaatcactatttctcacttctgtattttctcaaaaataattttgttacagagttcaatatactgtgtaccattgatcttctattgtgaaagcaaagaatttcatcaaaatattttaaattatgagtgaaaattgtgtatgttaattttgcagctataatattaatcaaattttgtgtaattctaatcacaaaatgacgtgccttaagtgcccctccagctgtgggttggcagtgtccggacagggagggcccatcaccgaaatcctgaatgattactagaccaattctattaaaaacatttcaaggcanaaaaa

SEQ ID NO: 719 - DNA, 579 bp, Homo sapiens
  misc_feature (400): n equals a,t,g, or c
  misc_feature (470): n equals a,t,g, or c
  misc_feature (501): n equals a,t,g, or c
  misc_feature (530): n equals a,t,g, or c
  misc_feature (534): n equals a,t,g, or c
  misc_feature (555): n equals a,t,g, or c
  misc_feature (578): n equals a,t,g, or c
gcaaacccactccaccttactaccagacaaccttagccaaaccatttacccaaataaagtataggcgatagaaattgaaacctggcgcaatagatatagtaccgcaagggaaagatgaaaaattatagccaagcataatatagcaaggactaacccctataccttctgcataatgaattaactagaaataactttgcaaggagagccaaagctaagacccccgaaaccagacgagctacctaagaacagctaaaagagcacacccgtctatgtagcaaaatagtgggaagatttataggtagaggcgacaaacctaccgagcctggtgatagctggttgtccaagatagaatcttagttcaactttaaatttgcccacagaaccctctaaatccccttgnaaatttaactggtagtccaaagaggaacaggtttttggacctaggaaaaaccttgtgaagagagtaaaantttaacaccctagtaggcctaaaagcagccnccaattaagaaagcggtcaagcttaacanccantacctaaaaaatcccaacttntactggacttcttacacccattng

SEQ ID NO: 720 - DNA, 403 bp, Homo sapiens
  misc_feature (19): n equals a,t,g, or c
gctttaaatttgcccacanaaccctctaaatccccttgtaaatttaactgttagtccaaagaggaacagctctttggacactaggaaaaaaccttgtagagagagtaaaaaatttaacacccatagtaggcctaaaagcagccaccaattaagaaagcgttcaagctcaacacccactacctaaaaaatcccaaacatataactgaactcctacacccaattggaccaatctatcaccctatagaagaactaatgttagtataagtaacatgaaaacattctcctccgcataagcctgcgtcagattaaaacactgaactgacaattaacagcccaatatctacaatcaaccaacaagtcattattaccctcactgtcaacccaacacaggcatgctcataag

SEQ ID NO: 721 - DNA, 327 bp, Homo sapiens
  misc_feature (311): n equals a,t,g, or c
  misc_feature (316): n equals a,t,g, or c
  misc_feature (320): n equals a,t,g, or c
  misc_feature (322): n equals a,t,g, or c
  misc_feature (323): n equals a,t,g, or c
ggacacttcttcatctcacccccccccgcccccctctaggagagctggctctgcagtgggggagggatgcagggacatttactgaaggagggacatggacaaaacaacattgaattcccagccccattggggagtgatctcttggacacagagcccccattcaaaatggggcagggcaagggtgggagtgtgcaaagccctgatctggagttacctgaggccatagctgccctattcacttctaagggccctgttttgagattgtttgttctaatttattttaagctaggtaaggctggggggagggtggngccgnggtncnnttag

SEQ ID NO: 722 - DNA, 202 bp, Homo sapiens
  misc_feature (48): n equals a,t,g, or c
  misc_feature (54): n equals a,t,g, or c
  misc_feature (63): n equals a,t,g, or c
  misc_feature (65): n equals a,t,g, or c
  misc_feature (73): n equals a,t,g, or c
  misc_feature (139): n equals a,t,g, or c
  misc_feature (165): n equals a,t,g, or c
  misc_feature (176): n equals a,t,g, or c
  misc_feature (182): n equals a,t,g, or c
  misc_feature (201): n equals a,t,g, or c
gctcgcgccccaggccggtgtacccccgcactccgcgccccggcctanaagctntctctcccngntccccggnccggcccccgtcccgccccgccccagatccgctgggccgccatggagcgctggccttgaccgtaanggcggcgcctggctgctcgtggctgnccgcgcgctgntgcaantgctgagctcagacctgcnt

SEQ ID NO: 723 - DNA, 354 bp, Homo sapiens
  misc_feature (39): n equals a,t,g, or c
  misc_feature (43): n equals a,t,g, or c
  misc_feature (50): n equals a,t,g, or c
  misc_feature (66): n equals a,t,g, or c
  misc_feature (72): n equals a,t,g, or c
  misc_feature (94): n equals a,t,g, or c
  misc_feature (113): n equals a,t,g, or c
  misc_feature (125): n equals a,t,g, or c
  misc_feature (154): n equals a,t,g, or c
  misc_feature (155): n equals a,t,g, or c
  misc_feature (203): n equals a,t,g, or c
  misc_feature (246): n equals a,t,g, or c
  misc_feature (274): n equals a,t,g, or c
  misc_feature (295): n equals a,t,g, or c
  misc_feature (298): n equals a,t,g, or c
  misc_feature (333): n equals a,t,g, or c
  misc_feature (335): n equals a,t,g, or c
gggagaatccatctaaagtaaacagcccagcattggganccanctctttngcaagttggaggcttnctgtancgttaatttcaggaaatcctangcaaatatgcagttactgntctagaagatanataggtagtgtgtactgtgatggaaattnnaatgtcactgttaaaaggtttgcattttgtgggcttggaagggcctanaacttccttcttaggctttctcttcactaagtgggctcttgcnttatattacttccagagaaaggcaggcnggattagaggcatggtaaggngancaatttggggaaatacctatactgtgcaaaagagncnaaggacaaccttttaatgg

SEQ ID NO: 724 - DNA, 310 bp, Homo sapiens
  misc_feature (22): n equals a,t,g, or c
  misc_feature (151): n equals a,t,g, or c
  misc_feature (171): n equals a,t,g, or c
  misc_feature (204): n equals a,t,g, or c
  misc_feature (217): n equals a,t,g, or c
  misc_feature (239): n equals a,t,g, or c
  misc_feature (248): n equals a,t,g, or c
  misc_feature (296): n equals a,t,g, or c
  misc_feature (297): n equals a,t,g, or c
gctacctcggtgcgcgcccggntcgcaggccccgccagaaggcccgtggccacggcgaatacggcgcgtgcgtcccggccccagggtccggcagccccgccggccgagcgcctccctgcggcctagccgggcccggccgggccggagcagnttcccacggcccccacccgntcgcctgcccgccgcctcgcgggtgggggcggngcgcgggctccanccccttttgaaatttgagtctngcaaccagnaagttcggaatcccgagataccggatcctctgcgcaaaatgttttctnncgaaggtgaaagg

SEQ ID NO: 725 - DNA, 99 bp, Homo sapiens
  misc_feature (10): n equals a,t,g, or c
  misc_feature (41): n equals a,t,g, or c
  misc_feature (49): n equals a,t,g, or c
  misc_feature (65): n equals a,t,g, or c
  misc_feature (90): n equals a,t,g, or c
gcggacgcgngggcgggcgggcgggcggccatgaggctcgngcggcggnggcgggcggggtaggncggcgggcccggggaggggggcggnagggcatgt

SEQ ID NO: 726 - DNA, 208 bp, Homo sapiens
  misc_feature (44): n equals a,t,g, or c
  misc_feature (64): n equals a,t,g, or c
  misc_feature (91): n equals a,t,g, or c
  misc_feature (137): n equals a,t,g, or c
  misc_feature (179): n equals a,t,g, or c
  misc_feature (185): n equals a,t,g, or c
  misc_feature (187): n equals a,t,g, or c
  misc_feature (204): n equals a,t,g, or c
agtgagtcatctgctggccggcttctgtgtgtgggtcgtcttgngctgggtagggggctcagtncccaacctgggccctgctgagcaggancagaaccattacctgcccagctgtttggctgtacggcgagaatggnacgctgactgcaaggggcttggcgcggttttccacaacctgnggctangncaagttcaagggcttcnactg

SEQ ID NO: 727 - DNA, 441 bp, Homo sapiens
  misc_feature (321): n equals a,t,g, or c
  misc_feature (394): n equals a,t,g, or c
  misc_feature (405): n equals a,t,g, or c
  misc_feature (422): n equals a,t,g, or c
  misc_feature (433): n equals a,t,g, or c
  misc_feature (438): n equals a,t,g, or c
ggaagacaagttcttgactctatgttgaggccagttgaaaaatgagggagaataaaaccatgaacgaaacaagaaagaaacaaaacagaagaggaatgaaaaagacataatgatgtcatccaagccaacaagccatgctgaagtaaatgaaaccatacccaacccttacccaccaagcagctttatggctcctggatttcaacagcctctgggttcaatcaacttagaaaaccaagctcagggtgctcagcgtgctcagccctacggcatcacatctccgggaatctttgctagcagtcaaccgggtcaaggaaatatacnaatgataaatccaagtgtgggaacagcagtaatgaactttaaaagaaagaagcaaaggcactagggggtgatncagatcatggntggattgatgccattgntttggaattgntttgngtt

SEQ ID NO: 728 - DNA, 429 bp, Homo sapiens
  misc_feature (95): n equals a,t,g, or c
  misc_feature (99): n equals a,t,g, or c
  misc_feature (149): n equals a,t,g, or c
  misc_feature (231): n equals a,t,g, or c
  misc_feature (243): n equals a,t,g, or c
  misc_feature (264): n equals a,t,g, or c
  misc_feature (284): n equals a,t,g, or c
  misc_feature (290): n equals a,t,g, or c
  misc_feature (311): n equals a,t,g, or c
  misc_feature (317): n equals a,t,g, or c
  misc_feature (327): n equals a,t,g, or c
  misc_feature (357): n equals a,t,g, or c
  misc_feature (363): n equals a,t,g, or c
  misc_feature (397): n equals a,t,g, or c
  misc_feature (403): n equals a,t,g, or c
  misc_feature (416): n equals a,t,g, or c
ctcaagtctcttttctgcccaaaaagggaaaagtgatagaaatgggggtggcaagtggggtgagtggatgaaggtgggtattgggggtggctgtnaaanaaaataatggagaatcacttttctatacatctacctatacttaatctaanaaacaaagtaatctactgtaaagtactctgccccttgaaagaagtattaaaaagagtgaggatggatttaaaaaaaaacatnaatttagaaatnttcaaaatggtttttgtgggnagattcctattatgaattcncacatntttaaagaatgagaaacatanttattngttaaaaatnccaaaaacagttcctgggttcctcttgttntttganaactaaaaaaaataccagagtgttggaatctccnaaaccnatgaaatcccccnaaattttaaggac

SEQ ID NO: 729 - DNA, 260 bp, Homo sapiens
  misc_feature (40): n equals a,t,g, or c
  misc_feature (53): n equals a,t,g, or c
  misc_feature (54): n equals a,t,g, or c
  misc_feature (57): n equals a,t,g, or c
  misc_feature (89): n equals a,t,g, or c
  misc_feature (103): n equals a,t,g, or c
  misc_feature (104): n equals a,t,g, or c
  misc_feature (120): n equals a,t,g, or c
  misc_feature (150): n equals a,t,g, or c
  misc_feature (188): n equals a,t,g, or c
  misc_feature (195): n equals a,t,g, or c
  misc_feature (251): n equals a,t,g, or c
  misc_feature (256): n equals a,t,g, or c
  misc_feature (259): n equals a,t,g, or c
tggtacccctgcaggtaccggtccggaattcccgggtcgntccacgcgtccgnnctntatcaaatgtttgccagaattcacagtttagngcatctaaatccanntatatagaaagcgctntttttcttttctttcttttctttttttttntttttttttaagatggactccacgttgccaaggctggnaatttgnttcctcttgatcaatataaagacgtttcaacattattgatctctttagagtttggntatantant

SEQ ID NO: 730 - DNA, 136 bp, Homo sapiens
  misc_feature (6): n equals a,t,g, or c
  misc_feature (15): n equals a,t,g, or c
  misc_feature (49): n equals a,t,g, or c
  misc_feature (51): n equals a,t,g, or c
  misc_feature (75): n equals a,t,g, or c
  misc_feature (123): n equals a,t,g, or c
  misc_feature (131): n equals a,t,g, or c
gcggancaccatatngaacgggagacctggtgactagacatcaagcaangnactatgcaccaagaatataaaganggaaaaaaaaaaaaaaaaaaaaaaaaaaaaaaaaaaaaaaaaaaaaanaaaaaaanaaaaa

SEQ ID NO: 731 - DNA, 110 bp, Homo sapiens
  misc_feature (1): n equals a,t,g, or c
  misc_feature (25): n equals a,t,g, or c
  misc_feature (34): n equals a,t,g, or c
  misc_feature (61): n equals a,t,g, or c
  misc_feature (83): n equals a,t,g, or c
  misc_feature (110): n equals a,t,g, or c
nccctagaaccccagccaggaccgnggaggcccngaagacccccatcaaggaggagctggnggcagggaaaacctacaggcgntgagagagaggccgcagcaagaagcan

SEQ ID NO: 732 - DNA, 639 bp, Homo sapiens
  misc_feature (222): n equals a,t,g, or c
  misc_feature (247): n equals a,t,g, or c
  misc_feature (361): n equals a,t,g, or c
  misc_feature (387): n equals a,t,g, or c
  misc_feature (457): n equals a,t,g, or c
  misc_feature (514): n equals a,t,g, or c
  misc_feature (577): n equals a,t,g, or c
  misc_feature (579): n equals a,t,g, or c
  misc_feature (588): n equals a,t,g, or c
  misc_feature (607): n equals a,t,g, or c
  misc_feature (639): n equals a,t,g, or c
gataaacaataaaatattgtgaacatcttcattagaatatttttgtcagctttggaggtaggatctagataaaagtttttaggctaacccaaaatatttatcttcagtaatgatatgccttttgctgtgtatgacatctgaaatgtggataatactgaaacgctctcagtcttaaacttataagctacactaaaatctaattaatgaattgctgtaaaagtngttgattattaatataagctgtagnttttaactttttatctgctgcctcttgtgttcatttccttttaaaggtgattggtttctgtttgtcatcaaaacataaaaaccttaaaggagtcttacagattttttgtgctgntaggtggcttttcccttctggctctntttttttaaacaataattaataactaaaatatttatgtcttattgaatatcttatggtataataacatantttatcttaaaataatcaaataggatattcatggatttttagatctgtcttgtgagntgtgacagatttattcaataaacatttattgagtcccctatcaactacttggtaccaaagaananagatgaatnaatcttggtctttcaaaangctataggctattggggggaaatagggatggn

SEQ ID NO: 733 - DNA, 380 bp, Homo sapiens
  misc_feature (12): n equals a,t,g, or c
  misc_feature (40): n equals a,t,g, or c
  misc_feature (44): n equals a,t,g, or c
  misc_feature (58): n equals a,t,g, or c
  misc_feature (306): n equals a,t,g, or c
gaattcattttnttcttattaaggaaatactttgcataangggnatcattcccagagngctttaccaaaattctcttaaataaaaataatagactcgctagtcagtaaagatatttgaatatgtatcgtgccccctccggtgtctttgatcaggatgacatgtgccatttttcagaggacgtgcagacaggctggcattctagattacttttcttactctgaaacatggcctgtttgggagtgcgggattcaaaggtggtcccaccgctgcccctactgcaaatggcagttttaatcttatctttnggcttctgcagatggttgcaattgatccttaaccaataatggtcagtcctcatctctgtcctgcttcataggtg

SEQ ID NO: 734 - DNA, 311 bp, Homo sapiens
  misc_feature (8): n equals a,t,g, or c
  misc_feature (13): n equals a,t,g, or c
  misc_feature (27): n equals a,t,g, or c
  misc_feature (61): n equals a,t,g, or c
  misc_feature (92): n equals a,t,g, or c
  misc_feature (128): n equals a,t,g, or c
ttaactgnaatcntctactataggttnagctggtacgcctgcaggtaccggtccggaattnccgggtcgacccacgcgtccgcggacgcttnggttggtggccaaggaaaggtatatagtaaaagttntaaaccatgtcaactgaagtgagtgtaatctcagatatcaacattattatattttaaaatcacgctatggaaatatcacctgaattctgtcatttgtcagatttacagtacctttttttctttaacttttagcattaaataaaaataaaattgggagcactgaaaaaaaaaaaaaaaaaaaaa

SEQ ID NO: 735 - DNA, 361 bp, Homo sapiens
  misc_feature (173): n equals a,t,g, or c
  misc_feature (219): n equals a,t,g, or c
  misc_feature (308): n equals a,t,g, or c
  misc_feature (314): n equals a,t,g, or c
  misc_feature (327): n equals a,t,g, or c
  misc_feature (331): n equals a,t,g, or c
  misc_feature (343): n equals a,t,g, or c
gtaccgctgccgccgtctctaaggtcgcccgggtcccaccgccgccaccatgcctcggggaagccgcagcgcggcctcccggccagccagccgccccgccgcgccctctgcccacccgcccgcgcacccaccgccctcggcagccgccccagcccccgccccttcgggccagncggggctcatggctcagatggcgaccacggccgcaggggtagccgngggctcggctgtgggacacgtcatgggcagcgccctgaccggagccttcagcggggggagctcggagccctcccagcctgctgtccagnaggccnccacccccgctgncccncagcccctgcanatggggccctgcgcctat

SEQ ID NO: 736 - DNA, 388 bp, Homo sapiens
  misc_feature (38): n equals a,t,g, or c
  misc_feature (43): n equals a,t,g, or c
  misc_feature (49): n equals a,t,g, or c
  misc_feature (53): n equals a,t,g, or c
  misc_feature (64): n equals a,t,g, or c
  misc_feature (85): n equals a,t,g, or c
  misc_feature (109): n equals a,t,g, or c
  misc_feature (148): n equals a,t,g, or c
  misc_feature (153): n equals a,t,g, or c
  misc_feature (161): n equals a,t,g, or c
  misc_feature (164): n equals a,t,g, or c
  misc_feature (169): n equals a,t,g, or c
  misc_feature (170): n equals a,t,g, or c
  misc_feature (187): n equals a,t,g, or c
  misc_feature (231): n equals a,t,g, or c
  misc_feature (237): n equals a,t,g, or c
  misc_feature (265): n equals a,t,g, or c
  misc_feature (296): n equals a,t,g, or c
  misc_feature (332): n equals a,t,g, or c
  misc_feature (345): n equals a,t,g, or c
  misc_feature (378): n equals a,t,g, or c
  misc_feature (384): n equals a,t,g, or c
gtatccatagttgctgctcagatgtttctttttttcanagttntgctgntaanaatatctcctnaacatttgacttcattgtggncaataatggtctctgaattgattnagacattcacacagcttgaagaaaatctaaaagatgaanatgantcattganaancaccnncaaagtaaacagaattnaagtttcagtcccggatgcaaatggaccctcagtgggggagatnccccanagtgaactcatcttgtatttatcagctngcaaattcttggacacagcagctttcttttncacctgacaagatgccattatttcaaatttatacgngggcatttattcnagaagtggacacatagggccctgtcttctgttnatgtanagga

SEQ ID NO: 737 - DNA, 146 bp, Homo sapiens
  misc_feature (32): n equals a,t,g, or c
  misc_feature (70): n equals a,t,g, or c
  misc_feature (96): n equals a,t,g, or c
  misc_feature (102): n equals a,t,g, or c
  misc_feature (124): n equals a,t,g, or c
  misc_feature (133): n equals a,t,g, or c
ggtaaatcaaagttttgggtggaagtgttganaagtatgagttttttgttgtttttgttttacttaaaanttttaatttatccagaatggcagtanctttancaagcagatggtcacaatctgntttctaaancattttttattaa

SEQ ID NO: 738 - DNA, 101 bp, Homo sapiens
  misc_feature (9): n equals a,t,g, or c
  misc_feature (46): n equals a,t,g, or c
  misc_feature (67): n equals a,t,g, or c
  misc_feature (99): n equals a,t,g, or c
  misc_feature (101): n equals a,t,g, or c
ggtgagagnctcatttctatgcacagtgtttctgaggaggatgganctagatagctgtctgttgtcntgtagcccaagcttgataatggaactatccangn

SEQ ID NO: 739 - DNA, 542 bp, Homo sapiens
  misc_feature (3): n equals a,t,g, or c
  misc_feature (10): n equals a,t,g, or c
  misc_feature (15): n equals a,t,g, or c
  misc_feature (23): n equals a,t,g, or c
  misc_feature (30): n equals a,t,g, or c
  misc_feature (458): n equals a,t,g, or c
  misc_feature (485): n equals a,t,g, or c
  misc_feature (494): n equals a,t,g, or c
  misc_feature (530): n equals a,t,g, or c
  misc_feature (541): n equals a,t,g, or c
tanggtctcnagggncttctacnggaaacnctcactatattgaaagctggtacccctgcaggtaccggtccggaattcccgggctaaatatgaaaataagtcatttgaaaaaaatacagtatgtaaaatttgttcattcgttgaggtaatggtgctatgtttttacaaaattgttcctacaccttttttctacttcaggtattttatttcaaccatttccatcaattgaactgttaccattgcctttttctgttgagaaattgcctctgaaaaatagtgctatttttcagcttaagtgttcttaagtgaatgaaattttcaaagtactagatcaccttaaaattatttcacgtactgaagacaattaagtccgttatgtttagagtagaaaatgtttaggttaaagagcatctgtcaacagaatctacaaaaaagattcccttgcatttgaattaagntctctattctcctattgctaaatgtgngatatatanagaggatgtataaaaggaaatggaaatagactatgnacttggctggnt

SEQ ID NO: 740 - DNA, 184 bp, Homo sapiens
  misc_feature (8): n equals a,t,g, or c
  misc_feature (13): n equals a,t,g, or c
  misc_feature (24): n equals a,t,g, or c
  misc_feature (77): n equals a,t,g, or c
  misc_feature (78): n equals a,t,g, or c
  misc_feature (107): n equals a,t,g, or c
  misc_feature (122): n equals a,t,g, or c
  misc_feature (138): n equals a,t,g, or c
  misc_feature (171): n equals a,t,g, or c
  misc_feature (175): n equals a,t,g, or c
aattcccnactcnagtttaggctngtacccctgcaggtaccggtccggaattcccgggtcgacccacgcgtccgtcnngctccgctgcggcgccccaactgctgatngagctgctgggcctnagcgctctgctgcagngagatcccaggaagctggcacatcttggaaggnccgncctgctcgg

SEQ ID NO: 741 - DNA, 231 bp, Homo sapiens
  misc_feature (9): n equals a,t,g, or c
  misc_feature (167): n equals a,t,g, or c
  misc_feature (170): n equals a,t,g, or c
  misc_feature (173): n equals a,t,g, or c
  misc_feature (176): n equals a,t,g, or c
  misc_feature (225): n equals a,t,g, or c
gcccacgcntccgggccagacgagcagaggacggcatcggcctggacttgcctctttatccagcccacccccaggacttccatgaagtagaggacttgataaagactgccataggcaacacactggtccaggacatctgatattctccagatacccaaaagctcctngtncgnctnagtgacgattacaacaggacgtttctggagaacctgaaagtgaacaccngagaat

SEQ ID NO: 742 - DNA, 119 bp, Homo sapiens
  misc_feature (66): n equals a,t,g, or c
  misc_feature (92): n equals a,t,g, or c
  misc_feature (97): n equals a,t,g, or c
  misc_feature (103): n equals a,t,g, or c
  misc_feature (116): n equals a,t,g, or c
gctagttctagatcgcgagcggccgcccttttttttttttttttttttttttttttttttttttcntttatacttttgtttatttttcctgnttatnaaaacngccaacaattgcnttt

SEQ ID NO: 743 - DNA, 580 bp, Homo sapiens
  misc_feature (264): n equals a,t,g, or c
  misc_feature (338): n equals a,t,g, or c
  misc_feature (366): n equals a,t,g, or c
  misc_feature (369): n equals a,t,g, or c
  misc_feature (385): n equals a,t,g, or c
  misc_feature (396): n equals a,t,g, or c
  misc_feature (443): n equals a,t,g, or c
  misc_feature (458): n equals a,t,g, or c
  misc_feature (499): n equals a,t,g, or c
  misc_feature (515): n equals a,t,g, or c
  misc_feature (540): n equals a,t,g, or c
  misc_feature (562): n equals a,t,g, or c
  misc_feature (563): n equals a,t,g, or c
gtcggttttttatttttttacaatttcacttagtctgtacttcatcattttgacagcatcttcctccctcctttaattaatggaatcttctgaattttccctgaatgtttaaagatcatgacatatgacttgatcttctgggagcaggaacaatgactactttttctggtgtgttaacatgtcgctagccagtgctccaggcacccagctttgtctgtgggttagtattggtgtatgtatgagtatctgtatgtatatatacanggtatttatagagagagactatcctggagaagcctcgttttgatgccattcttccttgcaaggttaagcaaggngggtggaaactaagacacctgaaccctncanggccttccgcatcaangtcagcatgangacagaccacagagctgcacttttgctccgaagctacttttcactgncccgttcaatctgantgctgccacaaccagtcagggccgtcacagagagggagagntgagaaagaagtcttnctctttattgagttccaagactacnaccaattacactggcttttgannccgtgatcctgatccaa

SEQ ID NO: 744 - DNA, 225 bp, Homo sapiens
  misc_feature (21): n equals a,t,g, or c
  misc_feature (210): n equals a,t,g, or c
  misc_feature (213): n equals a,t,g, or c
  misc_feature (217): n equals a,t,g, or c
  misc_feature (220): n equals a,t,g, or c
  misc_feature (224): n equals a,t,g, or c
cgaacaagacatgaaaagagnggtgacaaatcaagaataaacactggttgtagtcagttttgtttgttgaaaaaaaaaaaaaaaaaaaaaaaaaaaaaaaaaaaaaaaaaaaaaaaaaaaaaaaaaaaaaaaaaaaaaaaaaaaaaaaaaaaaaaaaaaaaaaaaaaaaaaaaaaaaaaaaaaaaaaaaaaaaaaaaaaaaaaggggggnccngttnaangggnc

SEQ ID NO: 745 - DNA, 338 bp, Homo sapiens
  misc_feature (1): n equals a,t,g, or c
  misc_feature (49): n equals a,t,g, or c
  misc_feature (56): n equals a,t,g, or c
  misc_feature (58): n equals a,t,g, or c
  misc_feature (62): n equals a,t,g, or c
  misc_feature (175): n equals a,t,g, or c
  misc_feature (316): n equals a,t,g, or c
  misc_feature (321): n equals a,t,g, or c
  misc_feature (334): n equals a,t,g, or c
  misc_feature (336): n equals a,t,g, or c
  misc_feature (338): n equals a,t,g, or c
nagctggtacgcctgcaggtaccggtccggaattcccgggtcgacccangcgtccntnaaantaaaggggctacagaaacactcatttttatgctgttccctcttgggcttcatgcaaagacaattctgtgtaaatgtacagttgactctgatttggaaatatgaaaatcagtcnatccttgttataaaaaatttttttacaattgtaattatattgatgttcatattgtgtaaaataactcatttaataaaatagtactttgatttacgacaaaaaaaaaaaaaaaaaaaaaaaaaaaaaaaaaaaaaaaaaaanaaaanaaaaaaaaaaggnangn

SEQ ID NO: 746 - DNA, 160 bp, Homo sapiens
ggtttcagttgagccctggaactcctaaacctttgcccctggggcttccatcccaaccagtgccaaggacctcctcttcccccttccaaataataaagtctatggacagggctgtctctgaagtactaacacaaggaaaaaaaaaaaaaaaaaaaaaaaa

SEQ ID NO: 747 - DNA, 218 bp, Homo sapiens
  misc_feature (178): n equals a,t,g, or c
  misc_feature (198): n equals a,t,g, or c
  misc_feature (204): n equals a,t,g, or c
  misc_feature (213): n equals a,t,g, or c
  misc_feature (218): n equals a,t,g, or c
ggaaaaaatgcattgtcaacggaatcttttatgtttgtttgtcttcctttaagcaacattgccttacttgttataaaagataaataaatatttgttcatttcaaaaaaaaaaaaaaaaaaaaaaaaaaaaaaaaaaaaaaaaaaaaaaaaaaaaaaaaaaaaaaaaaaaaaaaaaaangggcggccgttttaaagganccaagnttacgtacncgtgn

SEQ ID NO: 748 - DNA, 265 bp, Homo sapiens
  misc_feature (12): n equals a,t,g, or c
  misc_feature (28): n equals a,t,g, or c
  misc_feature (41): n equals a,t,g, or c
  misc_feature (52): n equals a,t,g, or c
  misc_feature (53): n equals a,t,g, or c
  misc_feature (77): n equals a,t,g, or c
  misc_feature (80): n equals a,t,g, or c
  misc_feature (82): n equals a,t,g, or c
  misc_feature (106): n equals a,t,g, or c
  misc_feature (107): n equals a,t,g, or c
  misc_feature (121): n equals a,t,g, or c
  misc_feature (127): n equals a,t,g, or c
  misc_feature (150): n equals a,t,g, or c
  misc_feature (153): n equals a,t,g, or c
  misc_feature (159): n equals a,t,g, or c
  misc_feature (161): n equals a,t,g, or c
  misc_feature (175): n equals a,t,g, or c
  misc_feature (186): n equals a,t,g, or c
  misc_feature (207): n equals a,t,g, or c
  misc_feature (208): n equals a,t,g, or c
  misc_feature (258): n equals a,t,g, or c
gctgttacttangaaaatggaacacaanaaaagtaaagaanaaagaatgacnnacacatttaagatctgattggacncgnangataatcctgagaattgctaatanntcactgggtttggnccttantgttgacttcagtatgctgaganggngaccancncgcctagagctaangcttgatgacnttgaagagtttgagaacattnnaaaggacctggagacccgtaagaaacagaaggaagatgtggaagttgtangaggcaa

SEQ ID NO: 749 - DNA, 156 bp, Homo sapiens
  misc_feature (92): n equals a,t,g, or c
  misc_feature (107): n equals a,t,g, or c
  misc_feature (132): n equals a,t,g, or c
  misc_feature (146): n equals a,t,g, or c
  misc_feature (156): n equals a,t,g, or c
gtctgaaaggaggaattttcattttcctttaaagtgaaaaggtaaaaactgcatttactaaaccaggccggtgggggctctgtgagcccctntgcacaggaagcctnagagactctgcatggtgttcccggngcatcctggccaangtgggagaan

SEQ ID NO: 750 - DNA, 174 bp, Homo sapiens
  misc_feature (155): n equals a,t,g, or c
  misc_feature (159): n equals a,t,g, or c
  misc_feature (164): n equals a,t,g, or c
  misc_feature (165): n equals a,t,g, or c
  misc_feature (173): n equals a,t,g, or c
ggtcatgcactcctacacttaaagaataaactatgttctaactgccacaaaaaaaaaaaaaaaaaaaaaaaaaaaaaaaaaaaaaaaaaaaaaaaaaataaaaaaaaaaaaaaaaaaaaaaaaaaaaaaaaaaaaaaaaaaaaaaaaaaaaaaangggnggccnntttaaagna

SEQ ID NO: 751 - DNA, 74 bp, Homo sapiens
  misc_feature (42): n equals a,t,g, or c
  misc_feature (43): n equals a,t,g, or c
  misc_feature (44): n equals a,t,g, or c
  misc_feature (67): n equals a,t,g, or c
ccagtcctcacccatggcatgccccctgcgatcaggccattnnnctcctcgtggtcatcttccacangtactcc

SEQ ID NO: 752 - DNA, 210 bp, Homo sapiens
  misc_feature (88): n equals a,t,g, or c
  misc_feature (155): n equals a,t,g, or c
gctctaagtcacgggaactgcccttgctacttgtgacctgccctttactcagcagtttttgttctgggaagccctgggattctgctantacctatcactgtaggtgctgaagggaaacagatgaaaacatgacctcaaggagcttctgtaatganaaaccaagctgcgctggaaagatttaaaggacctgaactgtcttgactctttgat

SEQ ID NO: 753 - DNA, 313 bp, Homo sapiens
  misc_feature (310): n equals a,t,g, or c
  misc_feature (312): n equals a,t,g, or c
  misc_feature (313): n equals a,t,g, or c
ggtgagtgtcatttttaagaacagttgtagcccttctgattattgcagtagctgtagaagtatgtaagaatatgtgatgggtgtagtcattagcaaagcatttaaatcacttgagtattttgtcatggttcattattattaaagcacaaaataacctattgttagaaaatatgtgtttttataaatgaatgtaaaataattaaatgaattgtgaaatggatgtttaagaaaatataggcttaaaaagtaaatctataaaatgatgtcttaaaacagccatatcatgaaaaattctacttagctatattantnn

SEQ ID NO: 754 - DNA, 445 bp, Homo sapiens
  misc_feature (2): n equals a,t,g, or c
  misc_feature (4): n equals a,t,g, or c
  misc_feature (9): n equals a,t,g, or c
  misc_feature (26): n equals a,t,g, or c
  misc_feature (83): n equals a,t,g, or c
  misc_feature (84): n equals a,t,g, or c
  misc_feature (86): n equals a,t,g, or c
  misc_feature (93): n equals a,t,g, or c
  misc_feature (96): n equals a,t,g, or c
  misc_feature (97): n equals a,t,g, or c
  misc_feature (102): n equals a,t,g, or c
  misc_feature (108): n equals a,t,g, or c
  misc_feature (113): n equals a,t,g, or c
  misc_feature (116): n equals a,t,g, or c
  misc_feature (126): n equals a,t,g, or c
  misc_feature (128): n equals a,t,g, or c
  misc_feature (142): n equals a,t,g, or c
  misc_feature (157): n equals a,t,g, or c
  misc_feature (160): n equals a,t,g, or c
  misc_feature (165): n equals a,t,g, or c
  misc_feature (181): n equals a,t,g, or c
  misc_feature (198): n equals a,t,g, or c
  misc_feature (210): n equals a,t,g, or c
  misc_feature (211): n equals a,t,g, or c
  misc_feature (214): n equals a,t,g, or c
  misc_feature (248): n equals a,t,g, or c
  misc_feature (283): n equals a,t,g, or c
  misc_feature (299): n equals a,t,g, or c
  misc_feature (344): n equals a,t,g, or c
  misc_feature (345): n equals a,t,g, or c
  misc_feature (355): n equals a,t,g, or c
  misc_feature (364): n equals a,t,g, or c
  misc_feature (421): n equals a,t,g, or c
  misc_feature (429): n equals a,t,g, or c
  misc_feature (444): n equals a,t,g, or c
cngnggcangggggaaacccagggancagcgatgggctgcatggttgcatcagggctcctgacaggattggccgaggtcctcnngntgctgtngcnnacccnacagcnaggcnacnttcaataccnanggtttcgggtccanctggaatccatgaanaanctgantgacctggaggcacantgggcacccagcccccncctggaagcccnnaancttctggccgccgtgtgccaccaccctgctctgnctctgagatagccctgggtaccctgagcccaccanggacacctcgcccttnagcccaccaccctggcaggctttcatccccgtccatgctcaagannggtccctggncaccatggncattaccacccttcagggcctgagcagctggatctggtacaaagcaatcggacatanagttgganggggaagcccctgang

SEQ ID NO: 755 - DNA, 531 bp, Homo sapiens
  misc_feature (527): n equals a,t,g, or c
  misc_feature (528): n equals a,t,g, or c
  misc_feature (529): n equals a,t,g, or c
  misc_feature (530): n equals a,t,g, or c
  misc_feature (531): n equals a,t,g, or c
ggagccaaagctaagacccccgaaaccagacgagctacctaagaacagctaaaagagcacacccgtctatgtagcaaaatagtgggaagatttataggtagaggcgacaaacctaccgagcctggtgatagctggttgtccaagatagaatcttagttcaactttaaatttgcccacagaaccctctaaatccccttgtaaatttaactgttagtccaaagaggaacagctctttggacactaggaaaaaaccttgtagagagagtaaaaaatttaacacccatagtaggcctaaaagcagccaccaattaagaaagcgttcaagctcaacacccactacctaaaaaatcccaaacatataactgaactcctcacacccaattggaccaatctatcaccctatagaagaactaatgttagtataagtaacatgaaaacattctcctccgcataagcctgcgtcagattaaaacactgaactgacaattaacagcccaatatctacaatcaaccaacaagaaaaacannnnn

SEQ ID NO: 756 - DNA, 540 bp, Homo sapiens
  misc_feature (1): n equals a,t,g, or c
  misc_feature (493): n equals a,t,g, or c
  misc_feature (496): n equals a,t,g, or c
  misc_feature (497): n equals a,t,g, or c
  misc_feature (498): n equals a,t,g, or c
  misc_feature (532): n equals a,t,g, or c
ngttgcgttgcggaccgcgagctgcactgcttcctgcccaagcccaagctcctcgcagcagtaggggacaagatgccaactggcaagcagctagctgacattggctataagaccttctctacctccatgatgcttctcactgtgtatggggggtacctctgcagtgtccgagtctaccactatttccagtggcgcagggcccagcgccaggccgcagaagaacagaagacctcaggaatcatgtagaactggggggctttttctcctgagcagagaggcccaaggcatgctgtggagagacttcacctgccaccatttccaggtcaacaggactagagcgttgatggttttcaaaccctgttggaagaaagtgcccatggtttctctggttctgccagtttgacaagtttatggaggcttttgaatcgtaatagcaatgtgagggtgagggacaccctacagacattaaataatttgctggtgaaaaaaaaanaannnaaaaaggggcgggccggttttaaaagatccaaanttacgtac

SEQ ID NO: 757 - DNA, 560 bp, Homo sapiens
  misc_feature (414): n equals a,t,g, or c
  misc_feature (435): n equals a,t,g, or c
  misc_feature (505): n equals a,t,g, or c
  misc_feature (528): n equals a,t,g, or c
  misc_feature (539): n equals a,t,g, or c
  misc_feature (549): n equals a,t,g, or c
  misc_feature (553): n equals a,t,g, or c
gaaattattcccaagaataccttacttggttcaaaagcagactgtttctcttcatttcatctcaaatcagacttctgggcaagatgttctttagagtaagcaaacctacaacctaaaaatctcttcaagaggcatctctggtcttgtgacgagacctcttcaaaaacccacagtaaaactcccctccctccagttggccaccagtctgccaccaaacatgaacaaattctgctgctaatcggtttcccttgtgatctggttcctgaggtcttcggatctgtgcaatgaattatttattgttttattaaaccgacagtggtgtcccagagaggaaccataaataaaatggaaatctggtgctgtgataaagtaataactagcattaatgagacctggttttcctttcagaaaggncagtatacctgtaacaaaggntaaagcaatttatatttaatttgcattctgatggtaacatttaaacagcaattctaacaaaaatgcatcnagtctaattcttacctctatcanaaaacaactgnataaaatttntganccacctt

SEQ ID NO: 758 - DNA, 155 bp, Homo sapiens
  misc_feature (6): n equals a,t,g, or c
  misc_feature (9): n equals a,t,g, or c
  misc_feature (28): n equals a,t,g, or c
  misc_feature (52): n equals a,t,g, or c
  misc_feature (84): n equals a,t,g, or c
  misc_feature (117): n equals a,t,g, or c
  misc_feature (140): n equals a,t,g, or c
  misc_feature (143): n equals a,t,g, or c
  misc_feature (149): n equals a,t,g, or c
gattcntanaagtatgagaagaattatncttattgaccattaatgtcatgtncattttaatgtaatataattgagatgaaatgntctctggttggaacagactctctctttattttnttgcaatctttaagaatacatanatntaaaantcatta

SEQ ID NO: 759 - DNA, 80 bp, Homo sapiens
  misc_feature (40): n equals a,t,g, or c
  misc_feature (45): n equals a,t,g, or c
  misc_feature (49): n equals a,t,g, or c
  misc_feature (52): n equals a,t,g, or c
  misc_feature (58): n equals a,t,g, or c
ggcggtaagtgcggtgcagtattcaactgaccggtggacncagancttnagncatganggtaacaggcatctttcttctc

SEQ ID NO: 760 - DNA, 286 bp, Homo sapiens
  misc_feature (2): n equals a,t,g, or c
  misc_feature (26): n equals a,t,g, or c
  misc_feature (60): n equals a,t,g, or c
  misc_feature (61): n equals a,t,g, or c
  misc_feature (80): n equals a,t,g, or c
  misc_feature (124): n equals a,t,g, or c
  misc_feature (131): n equals a,t,g, or c
  misc_feature (148): n equals a,t,g, or c
  misc_feature (151): n equals a,t,g, or c
  misc_feature (160): n equals a,t,g, or c
  misc_feature (164): n equals a,t,g, or c
  misc_feature (180): n equals a,t,g, or c
  misc_feature (184): n equals a,t,g, or c
  misc_feature (189): n equals a,t,g, or c
  misc_feature (220): n equals a,t,g, or c
  misc_feature (240): n equals a,t,g, or c
  misc_feature (259): n equals a,t,g, or c
  misc_feature (282): n equals a,t,g, or c
tntggaaagctgttccgcctgcaggnaccggtccggaattcccgggtcgacccacgcgtnntaactctgtcttgacgcgnggactgcctggcacatagtattcattctcttccctttaacatanaagtgtncagctgcgtacagtctntcnaccagcaantgtnaacgaacctgtgcctntaanaagcnattctaaaccacctatgagtatttcttttanggctcacttaaatacatgtntgtatattctgtattctantcagaataatctatatctgatcnaggt

SEQ ID NO: 761 - DNA, 207 bp, Homo sapiens
  misc_feature (24): n equals a,t,g, or c
  misc_feature (30): n equals a,t,g, or c
  misc_feature (55): n equals a,t,g, or c
  misc_feature (89): n equals a,t,g, or c
  misc_feature (91): n equals a,t,g, or c
  misc_feature (96): n equals a,t,g, or c
  misc_feature (122): n equals a,t,g, or c
  misc_feature (171): n equals a,t,g, or c
  misc_feature (188): n equals a,t,g, or c
  misc_feature (198): n equals a,t,g, or c
  misc_feature (204): n equals a,t,g, or c
ggaactttagtattaaatcagttntcaatntcattgtttatgtattgttttactnctttttattcatacgtaaaattttggattaattngngaaantgtaattataagctgagaccggtggntctcttcttaaaagcaccatattaaatcctggaaaactaaaaaaaaaanaaaaaaaaaaaaaaaanaaaaaaaaanaaatgnaaa

SEQ ID NO: 762 - DNA, 162 bp, Homo sapiens
  misc_feature (21): n equals a,t,g, or c
  misc_feature (23): n equals a,t,g, or c
  misc_feature (61): n equals a,t,g, or c
  misc_feature (78): n equals a,t,g, or c
  misc_feature (82): n equals a,t,g, or c
  misc_feature (123): n equals a,t,g, or c
  misc_feature (132): n equals a,t,g, or c
  misc_feature (140): n equals a,t,g, or c
catgggacccctctcagcccntncctgcagattgcatgtcccctggaaggaggtcctgctnacagccttacttgtaancttntggaacccacccaccactgccaagctcactattgaatccangccattcantgtcgcanaggggaaggaggttcttctact

SEQ ID NO: 763 - DNA, 340 bp, Homo sapiens
  misc_feature (2): n equals a,t,g, or c
  misc_feature (50): n equals a,t,g, or c
tntaataatcaacaccctcctagccttactactaataattattacatttngactaccacaactcaacggctacatagaaaaatccaccccttacgagtgcggcttcgaccctatatcccccgcccgcgtccctttctccataaaattcttcttagtagctattaccttcttattatttgatctagaaattgccctccttttacccctaccatgagccctacaaacaactaacctgccactaatagttatgtcatccctcttattaatcatcatcctagccctaagtctggcctatgagtgactacaaaaaggattagactgaaccggaataaaaaaaaaa

SEQ ID NO: 764 - DNA, 354 bp, Homo sapiens
  misc_feature (318): n equals a,t,g, or c
  misc_feature (343): n equals a,t,g, or c
  misc_feature (344): n equals a,t,g, or c
aatcaacaccctcctagccttactactaataattattacattttgactaccacaactcaacggctacatagaaaaatccaccccttacgagtgcggcttcgaccctatatcccccgcccgcgtccctttctccataaaattcttcttagtagctattaccttcttattatttgatctagaaattgccctccttttacccctaccatgagccctacaaacaactaacctgccactaatagttatgtcatccctcttattaatcatcatcctagccctaagtctggcctatgagtgactacaaaaaggattagactgaanccgaataaaaaaaaaaaaaaaaccnngggggggggc

SEQ ID NO: 765 - DNA, 443 bp, Homo sapiens
  misc_feature (1): n equals a,t,g, or c
  misc_feature (99): n equals a,t,g, or c
  misc_feature (160): n equals a,t,g, or c
  misc_feature (298): n equals a,t,g, or c
  misc_feature (306): n equals a,t,g, or c
  misc_feature (317): n equals a,t,g, or c
  misc_feature (357): n equals a,t,g, or c
  misc_feature (377): n equals a,t,g, or c
  misc_feature (386): n equals a,t,g, or c
  misc_feature (390): n equals a,t,g, or c
  misc_feature (398): n equals a,t,g, or c
nttttaataatcaacaccctcctagccttactactaataattattacattttgactaccacaactcaacggctacataaaaaaatccaccccttacgantgcggcttcgaccctatatcccccgcccgcgtccctttctccataaaattcttcttagtanctattaccttcttattatttgatctaaaaattgccctccttttacccctaccatgagccctacaaacaactaacctgccactaatagttatgtcatccctcttattaatcatcatcctaccctaattctggctatgantgactacnaaaaggattanactgaaccgaataaaaaaaaaaaaaaaaaaaaaatcccanggggggcccggtccccattnccccctatnttantttttttnaaaatccctggccgcgttttaaacttttttattggaaaaaaaaca

SEQ ID NO: 766 - DNA, 351 bp, Homo sapiens
  misc_feature (29): n equals a,t,g, or c
  misc_feature (337): n equals a,t,g, or c
  misc_feature (345): n equals a,t,g, or c
  misc_feature (347): n equals a,t,g, or c
  misc_feature (348): n equals a,t,g, or c
  misc_feature (350): n equals a,t,g, or c
gattttaataatcaacaccctcctagccntactactaataattattacattttgactaccacaactcaacggctacatagaaaaatccaccccttacgagtgcggcttcgaccctatatcccccgcccgcgtccctttctccataaaattcttcttagtagctattaccttcttattatttgatctagaaattgccctccttttacccctaccatgagccctacaaacaactaacctgccactaatagttatgtcatccctcttattaatcatcatcctagccctaagtctggcctatgagtgactacaaaaaggattagactgaaccgaataaaanaaaaaaanannana

SEQ ID NO: 767 - DNA, 511 bp, Homo sapiens
  misc_feature (389): n equals a,t,g, or c
  misc_feature (398): n equals a,t,g, or c
  misc_feature (421): n equals a,t,g, or c
  misc_feature (435): n equals a,t,g, or c
  misc_feature (447): n equals a,t,g, or c
  misc_feature (455): n equals a,t,g, or c
  misc_feature (508): n equals a,t,g, or c
ggtttctcgcagaccctataacataatccataattccttttatggctcctattaattacctcattattttaagtatgttttaaaggactgtatttgactaatgggttccctttaactgaacttgtttttatttctgatctaacaccccttttaaatggatcaagccaagacagaatgtttgtgacaacggtgcttgagattgaacaacttttggcaagggtaggtgttttaaaggactctatttaagtaatgggtttcctttaactgaactttttagttctgatctaacaccccttttaaatggatctgccaagacagaatgtttttgacaatggtgattgatactgaacagcttttgggcaagcgttaagtgcttcctgctaaatggntattttgcnaattaatgtgttctccttaaatngatcctggattatnttaaaacgactntttaattnatttaccatccatccaaaatttccccccagcccctaatttgataaacctcccngtc

SEQ ID NO: 768 - DNA, 490 bp, Homo sapiens
  misc_feature (4): n equals a,t,g, or c
  misc_feature (9): n equals a,t,g, or c
  misc_feature (66): n equals a,t,g, or c
  misc_feature (338): n equals a,t,g, or c
ctgnaagcnagacaccaaccctcactaaagggaacaaaagctggagctccaccgcggtgcggccgntctagaactagtggatcccccgggctgcaggaattcggcacgagggcagctcggactggtcatacggccttgagaagggtagtctcgggatgccgtccgaagtcggcgacagggccggggcgcaggcgcccgtgcggaatggcagatatttagcttcctgtggtatactgatgagcagaactcttccactacatacctcaattttgcctaaggagatatgtgcacgaactttcttcaaaatcactgcaccattaataaacaaaaggaaagantattcagagagaagaattttaggatattcaatgcaggaaatgtatgatgtagtatcgggagtggaggattacaagcattttgttccttggtgcaaaaaatcagatgttatatcaaagagatctggatattgtaaaacaagattagaaattgg

SEQ ID NO: 769 - DNA, 399 bp, Homo sapiens
  misc_feature (137): n equals a,t,g, or c
  misc_feature (225): n equals a,t,g, or c
  misc_feature (242): n equals a,t,g, or c
  misc_feature (246): n equals a,t,g, or c
  misc_feature (261): n equals a,t,g, or c
  misc_feature (276): n equals a,t,g, or c
  misc_feature (329): n equals a,t,g, or c
  misc_feature (332): n equals a,t,g, or c
  misc_feature (353): n equals a,t,g, or c
  misc_feature (358): n equals a,t,g, or c
  misc_feature (362): n equals a,t,g, or c
ggcacgagagcgcttggggatggatgccctggttgctgaagaggaggcggaagccaaggggaatgaagtgaggcccagtggccgggtcttcttgagttccgcagcacttagacttacgtgcaccttttcatcaggtncaggccccagttgtcaacccttccagaacattttcccatggattttgcggtatttgacttttcaagattcaagagtcttaataatccngttgggcaatttttggnaaanttggacccagtcaangtttttaaaattccntccccaaggccttccagccttggggggttccaaggttttcccgaagggcccantcntaccagctcctttttttaaanggcgnatanccagttgagcatatgactattgtttcccaattaccag

SEQ ID NO: 770 - DNA, 582 bp, Homo sapiens
  misc_feature (7): n equals a,t,g, or c
  misc_feature (529): n equals a,t,g, or c
  misc_feature (553): n equals a,t,g, or c
  misc_feature (573): n equals a,t,g, or c
  misc_feature (578): n equals a,t,g, or c
  misc_feature (579): n equals a,t,g, or c
gtccacncgtccgcccacgcgtccgcccacgcgtccggcggagttgcagcgcctggtggccgccgagcagcagaaggcgcagtttactgcacaggccacgtgcccgtagaaaagatactcatccactgtgggttttggtttcgccgtcaccccactgcctcactggattgtgaggatcatatgcgacaatgtatttgaaaacgactagaacattatcggaggaaggtggactctgaagtagtcgctgtagactatggatgtagaacaagggtttggagcccttcggacatggttctaacgcggcctgacttcttgctggctacatgaccttggactacataatcacgcctcttaaatgggaggtgatgacagctatccttgaggaccttagagagaactgatttcttagtacccagcctcacaaatagtgcatcacttcatggagttatgttgggataaatgtgtggagaagccagggaatcgcctagactctcgcactgaaaattgtctctccagctgtgtagaccgnttcattgacaccactcttgccatnacccagtcggtttgccccanattgnncca

SEQ ID NO: 771 - DNA, 452 bp, Homo sapiens
  misc_feature (15): n equals a,t,g, or c
  misc_feature (66): n equals a,t,g, or c
  misc_feature (389): n equals a,t,g, or c
  misc_feature (395): n equals a,t,g, or c
  misc_feature (432): n equals a,t,g, or c
  misc_feature (438): n equals a,t,g, or c
  misc_feature (450): n equals a,t,g, or c
gtggaggaattgcanaagctggaagtggtcatatgaactacattcaagtaacacctcaggaaaaanaagctatagaaaggttaaaggcattaggatttcctgaaggacttgtgatacaagcgtattttgcttgtgaaaaaaatgagaatttggctgccaattttcttctacagcagaactttgatgaagattgaaagggacttttttatatctcacacttcacaccagtgcattacactaacttgttcactggattgtctgggatgacttgggctcatatccacaatacttggtataaggtaataaattgttgggggtggggaaggaaggatctaggatacaggcaggataatacatgcattctctccattacaatccgcactcccacntgtgtnaatattacaccaaatcactttgcagtcttattctctntaaacntagtacttcctngt

SEQ ID NO: 772 - DNA, 631 bp, Homo sapiens
  misc_feature (298): n equals a,t,g, or c
  misc_feature (380): n equals a,t,g, or c
  misc_feature (451): n equals a,t,g, or c
  misc_feature (552): n equals a,t,g, or c
  misc_feature (559): n equals a,t,g, or c
  misc_feature (610): n equals a,t,g, or c
  misc_feature (611): n equals a,t,g, or c
  misc_feature (614): n equals a,t,g, or c
  misc_feature (631): n equals a,t,g, or c
ggagggactaaccccccaggagatctgcgacaagtaccacatcatccagagccttggtctctgttgctgtaccatactcatctgtcccacacagatagagggtgttccactggcggagggactaaccccccaggagatctgcgacaagtaccacatcatccatgctgacatctaccgctggtttaacatttcgtttgatatttttggtcgcaccaccactccacagcagaccaaaatcacccaggacattttccagcagttgctgaaacgaagttttgtgctgcaagatactgtggancaactgcgatgtgagcactgtgctcgcttcctggctgaccgctttcgtggaaggcgtgtgtcccttctgtggctatgaagangctcggggtgaccagtgtgacaagtgtggcaagctcatcaatgctgtcgagcttaagaagcctcagtgttnagtctgccgatcatgccctgtggtgcagtcgagccagcacctgtttctggaactgcctaagctggagaagcgactggaggaatggttggggaggacattgnctggcantgatggacaccaatgcccagtttatcacccgttcttggcttccggatggcnncanccacctgcttaaccgan

SEQ ID NO: 773 - DNA, 631 bp, Homo sapiens
  misc_feature (1): n equals a,t,g, or c
  misc_feature (501): n equals a,t,g, or c
  misc_feature (583): n equals a,t,g, or c
  misc_feature (589): n equals a,t,g, or c
  misc_feature (595): n equals a,t,g, or c
  misc_feature (596): n equals a,t,g, or c
  misc_feature (631): n equals a,t,g, or c
ngtggatttacttgtcgacaaaaggcatctcttaattggcacatgaagaaacatgatgcagactccttctaccagttttcttgcaatatctgtggcaaaaaatttgagaagaaggacagcgtagtggcacacaaggcaaaaagccaccctgaggtgctgattgcagaagctctggctgccaatgcaggcgccctcatcaccagcacagatatcttgggcactaacccagagtccctgacgcagccttcagatggtcagggtcttcctcttcttcctgagcccttgggaaactcaacctctggagagtgcctactgttagaagctgaagggatgtcaaagtcatactgcagtgggacggaacgggtgagcctgatggctgatgggaagatctttgtgggaagcggcagcagtggaggcactgaagggctggttatgaactcagatatactcggtgctaccacagaggttctgattgaagattcagactctgccggaccttantggacaggaagacttggggcatgggacagctcagactttgtatttaaaagttaaaaaggacaaataaaaaaaaaaaggggcnggccgnttctannaggatccaagctttacgtaccccgttgcaatgccn

SEQ ID NO: 774 - protein, 101 aa, Homo sapiens
  SITE (69): Xaa equals any of the naturally occurring L-amino acids
  SITE (98): Xaa equals any of the naturally occurring L-amino acids
QDELQEESEMSEKKSCSSSPTQSEISTSLPPDRQRRKRELRTFSFSDDENKPPSPKEIRIEVAEGFTWXSNPLKWSVADVVRFIRSTDCASISKNIPXPGN

SEQ ID NO: 775 - protein, 97 aa, Homo sapiens
  SITE (49): Xaa equals any of the naturally occurring L-amino acids
AARAAREALLGWGTDCPPFLMCVVSLCCGIDMDARTTLETGVASRAHRXREEGAITGCQPLPGLGALSHGPAPSWVFILYLLGDRRRGILPGWDKPL

SEQ ID NO: 776 - protein, 146 aa, Homo sapiens
  SITE (21): Xaa equals any of the naturally occurring L-amino acids
  SITE (22): Xaa equals any of the naturally occurring L-amino acids
  SITE (77): Xaa equals any of the naturally occurring L-amino acids
  SITE (88): Xaa equals any of the naturally occurring L-amino acids
  SITE (104): Xaa equals any of the naturally occurring L-amino acids
  SITE (121): Xaa equals any of the naturally occurring L-amino acids
  SITE (125): Xaa equals any of the naturally occurring L-amino acids
  SITE (126): Xaa equals any of the naturally occurring L-amino acids
  SITE (140): Xaa equals any of the naturally occurring L-amino acids
  SITE (143): Xaa equals any of the naturally occurring L-amino acids
FGRESCSVRTQREPWKPQRIXXPPATLAPRYYRRNCVDAFPDTLSLSPGERATLSCRTSQSVGSNFLTWYEQKSGQXPRLLMFGNSRXPLASQTGSVAVGLGQXSLSPSADWRLKILQCIXVQQXXFRSTMFQFWARGPXLEXKDC

SEQ ID NO: 777 - protein, 201 aa, Homo sapiens
  SITE (12): Xaa equals any of the naturally occurring L-amino acids
  SITE (21): Xaa equals any of the naturally occurring L-amino acids
  SITE (47): Xaa equals any of the naturally occurring L-amino acids
  SITE (175): Xaa equals any of the naturally occurring L-amino acids
  SITE (186): Xaa equals any of the naturally occurring L-amino acids
  SITE (187): Xaa equals any of the naturally occurring L-amino acids
RSGSGSKIKSRXLGVPRRSQXSEGCPATPAGAPPGQGHTTGSVKPLXRSDAMELDLSPPHLSSSPEDLCPAPGTPPGTPRPPDTPLPEEVKRSQPLLIPTTGRKLREEERRATSLPSIPNPFPELCSPPSQSPILGGPSSARGLLPANASRPHVVKVYSEDGACSLWRWQQVPQXATCVKCWCTSXXLSDETWGFVECHPN

SEQ ID NO: 778 - protein, 120 aa, Homo sapiens
  SITE (81): Xaa equals any of the naturally occurring L-amino acids
NQCSGERHLRVTQGLGTGAFLGGLRPVLQPRQGQDFRKYEEGFDPYSMFTPEQIMGKDVRLLRIKKEGSLDLALEGGVDSXIGKVVVSAVYERGAAERHGGIVKGDEIMAINGKIVTDYT

SEQ ID NO: 779 - protein, 111 aa, Homo sapiens
  SITE (88): Xaa equals any of the naturally occurring L-amino acids
  SITE (91): Xaa equals any of the naturally occurring L-amino acids
  SITE (94): Xaa equals any of the naturally occurring L-amino acids
  SITE (98): Xaa equals any of the naturally occurring L-amino acids
  SITE (101): Xaa equals any of the naturally occurring L-amino acids
  SITE (103): Xaa equals any of the naturally occurring L-amino acids
  SITE (106): Xaa equals any of the naturally occurring L-amino acids
  SITE (107): Xaa equals any of the naturally occurring L-amino acids
  SITE (108): Xaa equals any of the naturally occurring L-amino acids
HQEELRLLGRKARRNTRLRDEFSTEAAKLWTLARPFCPPLLATLLQMQMVVLPCLGFTLLLWSQVSGAQGQEFHFGPCQVKGVVPQKXWEXFWXVKDXMQXQXNIXXXRLL

SEQ ID NO: 780 - protein, 110 aa, Homo sapiens
IRHEFNTKCPSGSCVMNQYLSSKFPKDFSTSCRAHFERYLLSQKPKCLLQAPIPTNIMTTPVCGNHLLEVGEDCDCGSPKECTNLCCEALTCKLKPGTDCGGDAPNHTTE

SEQ ID NO: 781 - protein, 124 aa, Homo sapiens
GQPARVWSLDTMGTRLLPALFLVLLVLGFAPRALLTHSPPAEVQGTQQPQQDEMPSPTFLTQVKESLSSYWESAKTAAQNLYEKTYLPAVDEKLRDLYSKSTAAMSTYTGIFTDQVLSVLKGEE

SEQ ID NO: 782 - protein, 86 aa, Homo sapiens
NRDVSRDPQFWRLRSLKSRHQQIPHLVKAHSLLHRWHCLAVFSHGRRGKQAPLGLFYKGTNSMPKGRALMTLSPTKRLHFFILLEG

SEQ ID NO: 783 - protein, 102 aa, Homo sapiens
  SITE (66): Xaa equals any of the naturally occurring L-amino acids
  SITE (73): Xaa equals any of the naturally occurring L-amino acids
  SITE (86): Xaa equals any of the naturally occurring L-amino acids
  SITE (98): Xaa equals any of the naturally occurring L-amino acids
GQSPDAGFLVFPAGIKQKGLLLSSSLMHSESELDSDDAIFTWPDREKGKLLAWSEWLCTQRADPSXRPGARGXRSCSHLVCLLRAXPGTIARPVLLTXRVLR

SEQ ID NO: 784 - protein, 44 aa, Homo sapiens
IYITGYVNIFKYWGNCFTVLEPSKIHLCFVFMFICLLKARVEDK

SEQ ID NO: 785 - protein, 47 aa, Homo sapiens
  SITE (39): Xaa equals any of the naturally occurring L-amino acids
AGITPLHSSLGDKSESVSHQKKKEKERCLTKVTISHKFXTTYPSSFK

SEQ ID NO: 786 - protein, 301 aa, Homo sapiens
LRVFLCVFFYFAWLFEHYWTLVLEGKTFQLYSHNLIALFEHAKKPGLAAHIQTHRFPDRILPRKFALTTKIPDTKGCHKCCIVRNPYTGHKYLCGALQSGIVLLQWYEPMQKFMLIKHFDFPLPSPLNVFEMLVIPEQEYPMVCVAISKGTESNQVVQFETINLNSASSWFTEIGAGSQQLDSIHVTQLERDTVLVCLDKFVKIVNLQGKLKSSKKLASELSFDFRIESVVCLQDSVLAFWKHGMQGKSFKSDEVTQEISDETRVFRLLGSDRVVVLESRPTENPTAHSNLYILAGHENSY

SEQ ID NO: 787 - protein, 141 aa, Homo sapiens
NKFQGFSLPLVRKFAHSILQCLDALHKNRIIHCDLKPENILLKQQGRSGIKVIDFGSSCYEHQRVYTYIQSRFYRAPEVILGARYGMPIDMWSLGCILAELLTGYPLLPGEDEGDQLACMIELLGMPHRNCWMHPNEPKIL

SEQ ID NO: 788 - protein, 75 aa, Homo sapiens
EKRSSSFEARGLIWRSKTLHVHFQTWSGTYIVNYNQSWELHKDNEAQLKPSFSLPYLYPSLRTAVQENQAVCGLL

SEQ ID NO: 789 - protein, 59 aa, Homo sapiens
  SITE (53): Xaa equals any of the naturally occurring L-amino acids
MGWAKHCCRFILLPTQLLHNKALLSLKKKKKKKKKKKKKKKKKKKKKKKKKNXGGGPPP

SEQ ID NO: 790 - protein, 111 aa, Homo sapiens [sequence omitted]

SEQ ID NO: 791 - protein, 245 aa, Homo sapiens
EYLTSSGGRRMEYILTDIRKGHMCNAKLLRNMPEFSGVLHQCHILASEMVHFIHQMQYYITFEVLECSWDELWNKVQQAQDLDHIIAAHEVFLDTIISRCLLDSDSRALLNQLRAVFDQIIELQNAQDAIYRAALEELQRRLQFEEKKKQREIEGQWGVTAAEEEEENKRIGEFKESIPKMCSQLRILTHFYQGIVQQFLVLLTTSSDESLRFLSFRLDFNEHYKAREPRLRCVSGYQGAAHSHT

SEQ ID NO: 792 - protein, 108 aa, Homo sapiens [sequence omitted]

SEQ ID NO: 793 - protein, 128 aa, Homo sapiens
EAANMILVDDDFSAIMNAVEEGKGIFYNIKNFVRFQLSTSISALSLITLSTVFNLPSPLNAMQILWINIIMDGPPGRGEAGRLGALCLFTYLRGFLQGLLAVPKAIGMNKYSHFPSGVPRKLKCVALE

SEQ ID NO: 794 - protein, 262 aa, Homo sapiens
  SITE (38): Xaa equals any of the naturally occurring L-amino acids
SSVPGGYPGTEHSHRCRRFYQLALGWTTLAKTSWLEDXSPDLVPRGSQLAGGVILGVALWLRHDPQTTNLLYLELGDKPAPNTFYVGIYILIAVGAVMMFVGFLGCYGAIQESQCLLGTFFTCLVILFACEVAAGIWGFVNKDQIAKDVKQFYDQALQQAVVDDDANNAKAVVKTFHETLDCCGSSTLTALTTSVLKNNLCPSGSNIISNLFKEDCHQKIDDLFSGKLYLIGIAAIVVAVIMIFEMILSMVLCCGIRNSSVY

SEQ ID NO: 795 - protein, 45 aa, Homo sapiens
  SITE (44): Xaa equals any of the naturally occurring L-amino acids
  SITE (45): Xaa equals any of the naturally occurring L-amino acids
SQLLGRLRQENGVNPGGGACSEPRSCHCTPAWATERDFRLKKKXX

SEQ ID NO: 796 - protein, 178 aa, Homo sapiens
FRALHRGAALDLSPLHRSPHPSRQAIFCWMSFSAYQTAFICLGLLVQQIIFFLGTTALAFLVLMPVLHGRNLLLFRSLESSWPFWLTLALAVILQNMAAHWVFLETHDGHPQLTNRRVLYAATFLLFPLNVLVGAMVATWRVLLSALYNAIHLGQMDLSLLPPRAALSTPATTRTETS

SEQ ID NO: 797 - protein, 219 aa, Homo sapiens
  SITE (66): Xaa equals any of the naturally occurring L-amino acids
AGLCSADWRPPGTEVTSQGPRQPSSSGAKRRRLRAALGPQPTRSALRFPSASPGSLKAKQSMAGIXGRESNAPSVPTVSLLPGAPGGNASSRTEAQVPNGQGSPGGCVCSSQASPAPRAAAPPRAARGPTPRTEEAAWAAMALTFLLVLLTLATLCTRLHRNFRRGESIYWGPTADSQDTVAAVLKRRLLQPSRRVKRSRRRPLLPPTPDSGPEGESSE

SEQ ID NO: 798 - protein, 137 aa, Homo sapiens
  SITE (8): Xaa equals any of the naturally occurring L-amino acids
YQLKPYTXHLIKDLHFFLRVLIQLYHRIPHKLHIIPLWDRDPSTSLLEQGHIVHYLSQVLISSPKDQTVFQHLLLQGSVLILALWPCHMGFKDLSRHLQCLDRFQFTEHRCHQHFKTITMGQGGIKMDSKNIFLNVL

SEQ ID NO: 799 - protein, 119 aa, Homo sapiens
  SITE (49): Xaa equals any of the naturally occurring L-amino acids
CFGAGQSVAGRGHMPKSHHELPGASRQGPSIPHQVFQHDVPDGRQLGLXAEIKAGKSLKPTPQSKGLTTVFSGIGQPAFQVGGPSRSLRPGFPGPRPPGAQPHRFSLQPDSPLPSVSPA

SEQ ID NO: 800 - protein, 148 aa, Homo sapiens
  SITE (93): Xaa equals any of the naturally occurring L-amino acids
GSTHASGWSCVYKNDQAAKDNPTKSLQEEEPCPRFAHQLVYDELHKVHYLFGGNPGKSCSPKMRLDDFWSLKLCRPSKDYLLRHCKYLIRKHXFEEKAQVDPLSALKYLQNDLYITVDHSDPEETKEFQLLASALFKSGSRFYSSGLF

SEQ ID NO: 801 - protein, 214 aa, Homo sapiens
  SITE (214): Xaa equals any of the naturally occurring L-amino acids
SHIQGEGSCTLFRKYDHMRAAILEKMPLVERDGPQADEEAKESKEAAQLSEAAPVPTEPQASQLLDLLDLLDGASGDVQHPPHLDPSPGGALVHLLDLPCVPPPPAPIPDLKVFEREGVQLNLSFIRPPENPALLLITITATNFSEGDVTHFICQAAVPKSLQLQLQAPSGNTVPARGGLPITQLFRILNPNKAPLRLKLRSLRPLSPVGAGDX

SEQ ID NO: 802 - protein, 51 aa, Homo sapiens
KFANLKRGVSEDHYLLRTLKNKCLQLCMGTILYSLHFYGPTATSYPCKYIN

SEQ ID NO: 803 - protein, 167 aa, Homo sapiens
ARLPGSGCCRPPVSARVAPGHQGAVGGSGRRPARVEVVDAAARPSSRPFSLPAAIMLALISRLLDWFRSLFWKEEMELTLVGLQYSGKTTFVNVIASGQFSEDMIPTVGFNMRKVTKGNVTIKIWDIGGQPRFRSMWERYCRGVNAIVYMIDAADREKIEASRNELT

SEQ ID NO: 804 - protein, 361 aa, Homo sapiens
ARSRDGAPERREPGLGVLLREEEWSRGDAAAALTMSFLGGFFGPICEIDIVLNDGETRKMAEMKTEDGKVEKHYLFYDGESVSGKVNLAFKQPGKRLEHQGIRIEFVGQIELFNDKSNTHEFVNLVKELALPGELTQSRSYDFEFMQVEKPYESYIGANVRLRYFLKVTIVRRLTDLVKEYDLIVHQLATYPDVNNSIKMEVGIEDCLHIEFEYNKSKYHLKDVIVGKIYFLLVRIKIQHMELQLIKKEITGIGPSTTTETETIAKYEIMDGAPVKGESIPIRLFLAGYDPTPTMRDVNKKFSVRYFLNLVLVDEEDRSSFKQQEIILWRKAPEKLRKQRTNFHQRFESPESQASAEQPEM

SEQ ID NO: 805 - protein, 92 aa, Homo sapiens [sequence omitted]

SEQ ID NO: 806 - protein, 271 aa, Homo sapiens
  SITE (1): Xaa equals any of the naturally occurring L-amino acids
XGFPAPLPPTRMMESKMIAAIHSSSADATSSSNYHSFVTASSTSVDDALPLPLPVPQPKHASQKTVYSSFARPDVTTEPFGPDNCLHFNMTPNCQYRPQSVPPHHNKLEQHQVYGARSEPPASMGLRYNTYVAPGRNASGHHSKPCSRVEYVSSLSSSVRNTCYPEDIPPYPTIRRVQSLHAPPSSMIRSVPISRTEVPPDDEPAYCPRPLYQYKPYQSSQARSDYHVTQLQPYFENGRVHYRYSPYSSSSSSYYSPDGALCDVDAYGQSS

SEQ ID NO: 807 - protein, 56 aa, Homo sapiens
NNTFHNQNFNSKYKIKFILNNENVFVLNLVTREHRNKIHETKVARNVRTGGNVYII

SEQ ID NO: 808 - protein, 182 aa, Homo sapiens
  SITE (4): Xaa equals any of the naturally occurring L-amino acids
  SITE (106): Xaa equals any of the naturally occurring L-amino acids
VCAXHGHGRELFQYMLQKERVEPHQLAIDRPSQKLLKFLNKHYNLETTVPQVNNFVIFEGFFAHQHPPARKLPPKRAEGDIKPYSSSDREFLKVAVEPPWPLNRAXRRATPPAHPPPRSSSLGNSPERGPLRPFVPEQELLRSLRLCPPHPTARLLLAADPGGSPAQRRRTSSLPRSEESRY

SEQ ID NO: 809 - protein, 119 aa, Homo sapiens
  SITE (72): Xaa equals any of the naturally occurring L-amino acids
PAGESSPAPWLKGPGAHLPEARCGGGPRGRSQAQSPQSSGPVGGRGRSGSKARTPQLFRLQQQLQRFGHGCXVPRCWLQAAREHPGQGQEAQSEEEGEGQEGEGQEEGGSPLKGLDKAH

SEQ ID NO: 810 - protein, 144 aa, Homo sapiens
  SITE (24): Xaa equals any of the naturally occurring L-amino acids
DAGCGRPPEPAGGGQAAAATEGGXLSLGLGCRQLGLLPGPAYTAPPVGVTVGYSQAGFLPCRTLSLPPACSWRLLPRGRLFCLLKWVCCTLTGQGQSLGAVLWPRVGTCLDQNERTGSQTRLGVLILGWTRLWIQRRGLVSNKS

SEQ ID NO: 811 - protein, 154 aa, Homo sapiens
HEDNEHKRSLTKTPARKSAHVTVSGGTQKGEAVLGTHKLKTITGNSAAVITPFKLTTEATQTPVSNKKPVFDLKASLSRPLNYEPHKGKLKPWGQSKENNYLNQHVNRINFYKKTYKQPHLQTKEEQRKKREQERKEKKAKVLGMRRGLILAED

SEQ ID NO: 812 - protein, 86 aa, Homo sapiens
  SITE (78): Xaa equals any of the naturally occurring L-amino acids
NRSFFVSPFKSTGFKRGKCIHRPQCLAFSSASTWSTGLDAQTYLGNYFGRCLSLYRNCSWYFILLYIYSTCPLVFNYXQSLFRSKN

SEQ ID NO: 813 - protein, 566 aa, Homo sapiens
  SITE (341): Xaa equals any of the naturally occurring L-amino acids
RELVTDGGAASPWRCNWEQLLNPRPSEADPEADPEEATAARVIDRFDEGEDGEGDFLVVGSIRKLASASLLDTDKRYCGKTTSRKAWNEDHWEQTLPGSSDEEISDEEGSGDEDSEGLGLEEYDEDDLGAAEEQECGDHRESKKSRSHSAKTPGFSVQSISDFEKFTKGMDDLGSSEEEEDEESGMEEGDDAEDSQGESEEDRAGDRNSEDDGVVMTFSSVKVSEEVEKGRAVKNQIALWDQLLEGRIKLQKALLTTNQLPQPDVFPLFKDKGGPEFSSALKNSHKALKALLRSLVGLQEELLFQYPDTRYLVDGTKPNAGSEEISSEDDELVEEKKQQRXRVPAKRKLEMEDYPSFMAKRFADFTVYRNRTLQKWHDKTKLASGKLGKGFGAFERSILTQIDHILMDKERLLRRTQTKRSVYRVLGKPEPAAQPVPESLPGEPEILPQAPANAHLKDLDEEIFDDDDFYHQLLRELIERKTSSLDPNDQVAMGRQWLAIQKLRSKIHKKVDRKASKGRKLRFHVLSKLLSFMAPIDHTTMNDDARTELYRSLFGQLHPPDEGHGD

SEQ ID NO: 814 - protein, 66 aa, Homo sapiens
AYTTMTENKRLFFETPSQKQNKTKKLDKCYINVWVVRFYFESEVCRYAYRFLEFTTFLFCIINVIF

SEQ ID NO: 815 - protein, 79 aa, Homo sapiens
EKEVWRRKPRLENIMFWLEIRTRDGKYQCVQMYFTEFEGTHNQEGKQFVLHWTYYLDLGEQQNGMWSVRSILFVLLSLM

SEQ ID NO: 816 - protein, 227 aa, Homo sapiens
  SITE (29): Xaa equals any of the naturally occurring L-amino acids
  SITE (99): Xaa equals any of the naturally occurring L-amino acids
ACHEKVVNIQKDPGESLGMTVAGGASHRXWDLPIYVISVEPGGVISRDGRIKTGDILLNVDGVELTEVSRSEAVALLKRTSSSIVLKALEVKEYEPQEXCSSPAALDSNHNMAPPSDWSPSWVMWLELPRCLYNCKDIVLRRNTAGSLGFCIVGGYEEYNGNKPFFIKSIVEGTPAYNDGRIRCGDILLAVNGRSTSGMIHACLARLLKELKGRITLTIVSWPGTFL

SEQ ID NO: 817 - protein, 200 aa, Homo sapiens
  SITE (48): Xaa equals any of the naturally occurring L-amino acids
  SITE (55): Xaa equals any of the naturally occurring L-amino acids
  SITE (150): Xaa equals any of the naturally occurring L-amino acids
PRVRGHQGLLAPLGPQPLLGHPMPGSPSMETHCCPTPSLRPTTTGPRXPTGPPGXPGPMGPPGPPGPTGVPGSPGHIGPPGPTGPKGISGHPGEKGERGLRGEPGPQGSAGAAGGTGPKGDPGEKSHWAPSLQSFLQQQAQLELLARRVXLLEAIIWPEPELGSGAGPAGTGTPSLLRGKRGGHATNYRIVAPRSRDERG

SEQ ID NO: 818 - protein, 85 aa, Homo sapiens
EKLDEYIYRHFFGHTFSPPYGPSRPDKKQRMVNIENSRHRKQEQKHLQPQPYKREGKWHKYGRTNGRQMANLEIELGQLPFDPQY

SEQ ID NO: 819 - protein, 67 aa, Homo sapiens
LQSGFIRYCPARKFPFCVWLEQPAGTEWILEEGVTTGPPRKPRADIYNLRSPDEFIVGQNQALIEPG

SEQ ID NO: 820 - protein, 60 aa, Homo sapiens
  SITE (38): Xaa equals any of the naturally occurring L-amino acids
  SITE (57): Xaa equals any of the naturally occurring L-amino acids
  SITE (60): Xaa equals any of the naturally occurring L-amino acids
LTGSELMCRVPSPKVNLEPLDNTNKNIYFTSVIYLENXLSILHIFLIKSTGDHCEVXILX

SEQ ID NO: 821 - protein, 259 aa, Homo sapiens
LSLSLLSPQLDYHRGLLVDRPSETKTEEQGIPRPLHPPPPPPVQPPQHPRAEQREQERAVREQWAEREREMERRERTRSEREWDRDKVREGPRSRSRSRDRRRKERAKSKEKKSEKKEKAQEEPPAKLLDDLFRKTKAAPCIYWLPLTDSQIVQKEAERAERAKEREKRRKEQEEEEQKEREKEAERERNRQLEREKRREHSRERDRERERERERDRGDRDRDRERDRERGRERDRRDTKRHSRSRSRSTPVRDRGGRR

SEQ ID NO: 822 - protein, 59 aa, Homo sapiens
INPALLRKGNLFRQSGKGVLRKLSFFIPSFLPTTVTGYRGLWTLKTNVWPLTGLICIFL

SEQ ID NO: 823 - protein, 175 aa, Homo sapiens
  SITE (128): Xaa equals any of the naturally occurring L-amino acids
  SITE (133): Xaa equals any of the naturally occurring L-amino acids
SWKTGEDKSMSSLPGCIGLDAATATVESEEIAELQQAVVEELGISMEELRHFIDEELEKMDCVQQRKKQLAELETWVIQKESEVAHVDQLFDDASRAVTNCESLVKDFYSKLGLQYRDSSSEDESSRXTEIIXIPDEDDDVLSIDSGDAGSRTPKDQKLREAMAALRKSAQDVQK

SEQ ID NO: 824 - protein, 90 aa, Homo sapiens
  SITE (36): Xaa equals any of the naturally occurring L-amino acids
HKLNPMYLKLLQSFPLYFKQQKSGGHIVVLSFKLCXKFNHYFDALNILMCNICFCIKNTHIFQEKEIMLNSPVLRKIFMKHLNLKIKSKL

SEQ ID NO: 825 - protein, 156 aa, Homo sapiens
SRRKMAVLSKEYGFVLLTGAASFIMVAHLAINVSKARKKYKVEYPIMYSTDPENGHIFNCIQRAHQNTLEVYPPFLFFLAVGGVYHPRIASGLGLAWIVGRVLYAYGYYTGEPSKRSRGALGSIALLGLVGTTVCSAFQHLGWVKSGLGSGPKCCH

SEQ ID NO: 826 - protein, 259 aa, Homo sapiens
  SITE (20): Xaa equals any of the naturally occurring L-amino acids
SLTSYHNQTFCACAIVAAIXSFGWNTVKIDMSAARRDPLPIVPFGLAAFATTLFALGLALGTTIAVGMLFFIQMKIILRNKTSIESWIEEKAKDRIQYYQLDEVFVFPYDMGSRWRNFKQVFTWSGVPEGDGLEWPVREGCHQYSLTIEQLKQKADKRVRSVRYKVIEDYSGACCPLNKGIKTFFTSPCTEEPRIQLQKGEFILATRGLRYWLYGDKILDDSFIEGVSRIRGWFPRKCVEKCPCDAETDQAPEGEKKNR

SEQ ID NO: 827 - protein, 88 aa, Homo sapiens
  SITE (4): Xaa equals any of the naturally occurring L-amino acids
  SITE (19): Xaa equals any of the naturally occurring L-amino acids
  SITE (28): Xaa equals any of the naturally occurring L-amino acids
  SITE (39): Xaa equals any of the naturally occurring L-amino acids
  SITE (41): Xaa equals any of the naturally occurring L-amino acids
  SITE (82): Xaa equals any of the naturally occurring L-amino acids
EPWXLLKSLLCRRSPSRTXKQEEDRATXEAKNGEKARRXSXEVDGQHPAQEEVPESPQTSGPEQKIGVGAPGRKSQLERKQXWKRLQR

SEQ ID NO: 828 - protein, 206 aa, Homo sapiens
  SITE (14): Xaa equals any of the naturally occurring L-amino acids
LPGVFKMAASMHGXPSPSLEDAKLRRPMVIEIIEKNFDYLRKEMTQNIYQMATFGTTAGFSGIFSNFLFRRCFKVKHDALKTYASLATLPFLSTVVTDKLFVIDALYSDNISKENCVFRSSLIGIVCGVFYPSSLAFTKNGRLATKYHTVPLPPKGRVLIHWMTLCQTQMKLMAIPLVFQIMFGILNGLYHYAVFEETLEKTIHEE

SEQ ID NO: 829 - protein, 78 aa, Homo sapiens
YNIWFVNSETLPVCLLLSIELVFSFSWLSSCLLILSHMLPSLLVPSSLLYFTRFGTCSPLDFFFNILAFPRCKSLPPC

SEQ ID NO: 830 - protein, 101 aa, Homo sapiens
RFGRRTGRRWRRTTGGAEGVRGGDGRRGGPGPLLSRVGRLGLADRARAFYEDGGDEDIVTISQATPSSVSRGTAPSDNRVTSFRDLIHDQDEDEEEEEGQR

SEQ ID NO: 831 - protein, 155 aa, Homo sapiens
  SITE (64): Xaa equals any of the naturally occurring L-amino acids
RCSSIFTPWKLTTLSSFLHHHPGAQRSKLLSIFSPSPRTLTLYRMGPSSCLLLILIPLLQLINXGSTQCSLDSVMDKKIKDVLNSLEYSPSPISKKLSCASVKSQGRPSSCPAGMAVTGCACGYGCGSWDVQLETTCHCQCSVVDWTTARCCHLT

SEQ ID NO: 832 - protein, 238 aa, Homo sapiens
  SITE (221): Xaa equals any of the naturally occurring L-amino acids
YHLYFKMGDPNSRKKQALNRLRAQLRKKKESLADQFDFKMYIAFVFKEKKKKSALFEVSEVIPVMTNNYEENILKGVRDSSYSLESSLELLQKDVVQLHAPRYQSMRRDVIGCTQEMDFILWPRNDIEKIVCLLFSRWKESDEPFRPVQAKFEFHHGDYEKQFLHVLSRKDKTGIVVNNPNQSVFLFIDRQHLQTPKNKATIFKLCSICLYLPQEQLTHWXSWHHRGSPPSLYARVEY

SEQ ID NO: 833 - protein, 146 aa, Homo sapiens
  SITE (44): Xaa equals any of the naturally occurring L-amino acids
NSARAQMALEDQAATLEYKTIKEHLSSKSPNHGVNLVENLDSLXPKVPQREASLGPPGASLSQTGLSKRLEMHHSSSYGVDYKRSYPTNSLTRSHQAPLSKETTLTPPIPLTSPETRALAGETTRRPPRRGWTPSRCTAPSHLARP

SEQ ID NO: 834 - protein, 239 aa, Homo sapiens
QPPGTRDPAPPLITPATPQLSAAPDAMDPALAAQMSEAVAEKMLQYRRDTAGWKICREGNGVSVSWRPSVEFPGNLYRGEGIVYGTLEEVWDCVKPAVGGLRVKWDENVTGFEIIQSITDTLCVSRTSTPSAAMKLISPRDFVDLVLVKRYEDGTISSNATHVEHPLCPPKPGFVRGFNHPCGCFCEPLPGEPTKTNLVTFFHTDLSGYLPQNVVDSFFPRSMTRFYANLQKAVKQFHE

SEQ ID NO: 835 - protein, 154 aa, Homo sapiens
  SITE (24): Xaa equals any of the naturally occurring L-amino acids
QLTTVRRLLSEKATHVNTRDEDEXTPLHRAAYSGHLDIVQELIAQGADVHAVTVDGWTPLHSACKWNNTRVASFLLQHDADINAQTKGLLTPLHLAAGNRDSKDTLELLLMNRYVKPGLKNNLEETAFDIARRTSIYHYLFEIVEGCTNSSPQS

SEQ ID NO: 836 - protein, 77 aa, Homo sapiens
NTFIHEDIWNIRSICSTTNIQCKNGKMNCHEGVVKVTDCRDTGSSRAPNCRYRAIASTRRVVIACEGNPQVPVHFDG

SEQ ID NO: 837 - protein, 84 aa, Homo sapiens
RDAPGISLTVLLPHQQPPTFGPTLPPMREYPAWMLCFSGLSLSPFLQGMLVSLASQCPNWSPECLVLSQETAEHWPSTPKRPLH

SEQ ID NO: 838 - protein, 96 aa, Homo sapiens
CFSLPSLFTAVKFIKCFSVVFCSLSFTGYFFMYTFRIFCLLYPVVQMISYILQMPFQFLFSFSIKLPSCPNVQFVSVCVCVCVCVNLIFKSARLPI

SEQ ID NO: 839 - protein, 64 aa, Homo sapiens
  SITE (1): Xaa equals any of the naturally occurring L-amino acids
  SITE (58): Xaa equals any of the naturally occurring L-amino acids
XQATAINTDVNGCICFAVVTGLGRFGICERIDSFSKLFHKVKKLHFKGNRSYSSLKSXSNCSFI

SEQ ID NO: 840 - protein, 288 aa, Homo sapiens
EIRVSCTAGAGFPAAQARVRCLCHLILMSGEIAMCEPEFGNDKAREPSVGGRWRVSWYERFVQPCLVELLGSALFIFIGCLSVIENGTDTGLLQPALAHGLALGLVIATLGNISGGHFNPAVSLAAMLIGGLNLVMLLPYWVSQLLGGMLGAALAKAVSPEERFWNASGAAFVTVQEQGQVAGALVAEIILTTLLALAVCMGAINEKTKGPLAPFSIGFAVTVDILAGGPVSGGCMNPARAFGPAVVANHWNFHWIYWLGPLLAGLLVGLLIRCFIGDGKTRLILKAQ

SEQ ID NO: 841 - protein, 216 aa, Homo sapiens
  SITE (2): Xaa equals any of the naturally occurring L-amino acids
GXEGKGREGGVTRGRARAPGAARRRVELDRVCCQRRELRPPFYNSSTRAGHREQRARVSRNPIPSDRISPPQPNGEISGNMATEHVNGNGTEEPMDTTSAVIHSENFQTLLDAGLPQKVAEKLDEIYVAGLVAHSDLDERAIEALKEFNEDGALAVLQQFKDSDLSHVQNKSAFLCGVMKTYRQREKQGTKVADSSKGPDEAKIKALLERTGSHLM

SEQ ID NO: 842 - protein, 189 aa, Homo sapiens
DSDGSPLSNSQPSFPVEILPFLYLGCAKDSTNLDVLEEFGIKYILNVTPNLPNLFENAGEFKYKQIPISDHWSQNLSQFFPEAISFIDEARGKNCGVLVHCLAGISRSVTVTVAYLMQKLNLSMNDAYDIVKMKKSNISPNFNFMGQLLDFERTLGLSSPCDNRVPAQQLYFTTPSNQNVYQVDSLQST

SEQ ID NO: 843 - protein, 220 aa, Homo sapiens
  SITE (216): Xaa equals any of the naturally occurring L-amino acids
NTPGFMYKNLQCLVIDEADRIFDVGFEEELKQIIKLLPTRRQTMLFSATQTRKVEDLARISLKKEPLYVGVDDDKANATVDGLEQKNRKKKLMVFFSSCMSVKYHYELLNYIDLPVLAIHGKQKQNKRTTTFFQFCNADSGTLLCTDVAARGLDIPEVDWIVQYDPPDDPKEYIHRVGRTARGLNGRGHALLILRPEELGFLRYLKQSKVPLSEFXLFLV

SEQ ID NO: 844 - protein, 83 aa, Homo sapiens
  SITE (40): Xaa equals any of the naturally occurring L-amino acids
RPPFVPKHPAHADSLLGSLRYLSTQTLLPHPISPETPAFXLTIFPLPAFRFLLGAQRPLWGVASSPPTPPHPPPLPRQASPCR

SEQ ID NO: 845 - protein, 114 aa, Homo sapiens
  SITE (1): Xaa equals any of the naturally occurring L-amino acids
  SITE (15): Xaa equals any of the naturally occurring L-amino acids
  SITE (32): Xaa equals any of the naturally occurring L-amino acids
XSSRTCEGRVLSSVXPLAHVASVFLKLPDLEXLMKRENQKILTPLVSLDTPGKATVQVVILADPDGHEICFVGDEAFRELSKMDPEGSKLLDDAMAADKSDEWFAKHNKPKASG

SEQ ID NO: 846 - protein, 68 aa, Homo sapiens
SNGSICLDILRSQWSPALTVSKVLLSICSLLCDPNPDDPLVPEIAHTYKADREKYNRLAREWTQKYAM

SEQ ID NO: 847 - protein, 365 aa, Homo sapiens
GRVGSPGGCPWVLPSLPDTQTDLDRPPGRSRTGRPDAAMAELPGPFLCGALLGFLCLSGLAVEVKVPTEPLSTPLGKTAELTCTYSTSVGDSFALEWSFVQPGKPISESHPILYFTNGHLYPTGSKSKRVSLLQNPPTVGVATLKLTDVHPSDTGTYLCQVNNPPDFYTNGLGLINLTVLVPPSNPLCSQSGQTSVGGSTALRCSSSEGAPKPVYNWVRLGTFPTPSPGSMVQDEVSGQLILTNLSLTSSGTYRCVATNQMGSASCELTLSVTEPSQGRVAGALIGVLLGVLLLSVAAFCLVRFQKERGKKPKETYGGSDLREDAIAPGISEHTCMRADSSKGFLERPSSASTVTTTKSKLPMVV

SEQ ID NO: 848 - protein, 215 aa, Homo sapiens
LDHIVDKVKECVDHLSRDEDEEKLVASLWGAERCLRVLESVTVHNPENQSYLIAYKDSQLIVSSAKALQHCEELIQQYNRAEDSICLADSKPLPHQNVTNHVGKAVEDCMRAIIGVLLNLTNDNEWGSTKTGEQDGLIGTALNCVLQVPKYLPQEQRFDIRVLGLGLLINLVEYSARNRHCLVNMETSCSFDSSICSGEGDDSLRIGGQVHAVQL

SEQ ID NO: 849 - protein, 368 aa, Homo sapiens
GKAEGVCGLSHRQECQDPAGALESLRLALASRLLPDFLLERRLTLADALEKCLKKGKGEEQALAAAVLGLLCVQLGPGPKGEELFHSLQPLLVSVLSDSTASPAARLHCASALGLGCYVAAADIQDLVSCLACLESVFSRFYGLGGSSTSPVVPASLHGLLSAALQAWALLLTICPSTQISHILDRQLPRLPQLLSSESVNLRIAAGETIALLFELARDLEEEFVYEDMEALCSVLRTLATDSNKYRAKADRRRQRSTFRAVLHSVEGGECEEEIVRFGFEVLYMDSWARHRIYAAFKEVLGSGMHHHLQNNELLRDIFGLGPVLLLDATALKACKVPRFEKHLYNAAAFKARTKARSRVRDKRADIL

SEQ ID NO: 850 - protein, 218 aa, Homo sapiens
  SITE (96): Xaa equals any of the naturally occurring L-amino acids
  SITE (105): Xaa equals any of the naturally occurring L-amino acids
  SITE (180): Xaa equals any of the naturally occurring L-amino acids
  SITE (190): Xaa equals any of the naturally occurring L-amino acids
  SITE (194): Xaa equals any of the naturally occurring L-amino acids
  SITE (207): Xaa equals any of the naturally occurring L-amino acids
ASASICSGIKYAFQVIGELHSQLDGSEVLLLTDGEDNTASSCIDEVKQSGAIVHFIALGRAADEAVIEMSKITGGSHFYVSDEAQNNGLIDAFGAXTSGNTDLSXKSLQLESKGLTLNSNAWMNDTVIIDSTVGKDTFFLITWNSLPPSISLWDPSGTIMENFTVDATSKMAYLSIPGTXKVGTWAYNLXAKAXPETLTITVTSRAXKFFCASNHSEC

SEQ ID NO: 851 - protein, 303 aa, Homo sapiens
  SITE (133): Xaa equals any of the naturally occurring L-amino acids
  SITE (255): Xaa equals any of the naturally occurring L-amino acids
GCLGQTRPASPRTARESVLGVSQNMSFNLQSSKKLFIFLGKSLFSLLEAMIFALLPKPRKNVAGEIVLITGAGSGLGRLLALQFARLGSVLVLWDINKEGNEETCKMAREAGATRVHAYTCDCSQKEGVYRVXDQVKKEVGDVSILINNAGIVTGKKFLDCPDELMEKSFDVNFKAHLWTYKAFLPAMIANDHGHLVCISSSAGLSGVNGLADYCASKFAAFGFAESVFVETFVQKQKGIKTTIVCPFFIKTGMXEGCTTGCPSLLPILEPKYAVEKIVEAILQEKMYLYMPKLLYFMMFLKR

SEQ ID NO: 852 - protein, 340 aa, Homo sapiens
RTVIDAMSALLRLLRTGAPAAACLRLGTSAGTGSRRAMALYHTEERGQPCSQNYRLFFKNVTGHYISPFHDIPLKVNSKEENGIPMKKARNDEYENLFNMIVEIPRWTNAKMEIATKEPMNPIKQYVKDGKLRYVANIFPYKGYIWNYGTLPQTWEDPHEKDKSTNCFGDNDPIDVCEIGSKILSCGEVIHVKILGILALIDEGETDWKLIAINANDPEASKFHDIDDVKKFKPGYLEATLNWFRLYKVPDGKPENQFAFNGEFKNKAFALEVIKSTHQCWKALLMKKCNGGAINCTNVQISDSPFRCTQEEARSLVESVSSSPNKESNEEEQVWHFLGK

SEQ ID NO: 853 - protein, 317 aa, Homo sapiens
  SITE (165): Xaa equals any of the naturally occurring L-amino acids
ADLISLPTTVEGLQKSVASIGNTLNSVHLAVEALQKTVDEHKKTMELLQSDMNQHFLKETPGSNQIIPSPSATSELDNKTHSENLKQDILYLHNSLEEVNSALVGYQRQNDLKLEGMNETVSNLTQRVNLIESDVVAMSKVEKKANLSFSMMGDRSATLKRQSLXQVTNRTDTVKIQSIKKEDSSNSQVSKLREKLQLISALTNKPESNRPPETADEEQVESFTSKPSALPKFSQFLGDPVEKAAQLRPISLPGVSSTEDLQDLFRKTGQDVDGKLTYQEIWTSLGSAMPEPESLRAFDSDGDGRYSFLELRVALGI

SEQ ID NO: 854 - protein, 34 aa, Homo sapiens
LLFNFKQVFFASVRSGGSSQVFFMTLNRNSMMNW

SEQ ID NO: 855 - protein, 232 aa, Homo sapiens
LPVPGRGRVFFEDLGLRDTVRMAVVPLLLLGGLWSAVGASSLGVVTCGSVVKLLNTRHNVRLHSHDVRYGSGSGQQSVTGVTSVDDSNSYWRIRGKSATVCERGTPIKCGQPIRLTHVNTGRNLHSHHFTSPLSGNQEVSAFGEEGEGDYLDDWTVLCNGPYWVRDGEVRFKHSSTEVLLSVTGEQYGRPISGQKEVHGMAQPSQNNYWKAMEGIFMKPSELLKAEAHHAEL

SEQ ID NO: 856 - protein, 147 aa, Homo sapiens
  SITE (41): Xaa equals any of the naturally occurring L-amino acids
CFSSSGFTCHDHGATVLQYAPKQQLLISGGRKRHVCIFDIXQRQLIHTFQAHDSAIKALALDPYEEYFTTGSAEGNIKVWRLTGHGLIHSFKSEHAKQSIFRNIGAGVMQIDIIQGNRLFSCGADGTLKTRVLPNAFNIPNRILDIL

SEQ ID NO: 857 - protein, 96 aa, Homo sapiens
  SITE (59): Xaa equals any of the naturally occurring L-amino acids
  SITE (61): Xaa equals any of the naturally occurring L-amino acids
  SITE (63): Xaa equals any of the naturally occurring L-amino acids
PRVRINKESEVYKMLQEKQELNEPLKQSTSFLILQEILESEIKGDLNNPQDSEVLKLLXPXVXASIGNAQKVPMCDKCGPGIVGMFVKLRGPSSPP

SEQ ID NO: 858 - protein, 45 aa, Homo sapiens
DTSEAILTSEYPSSSLKTETSHLENVNLCCHLVAGVSRHKTEFKK

SEQ ID NO: 859 - protein, 758 aa, Homo sapiens
  SITE (590): Xaa equals any of the naturally occurring L-amino acids
KMSENSSDSDSSCGWTVISHEGSDIEMLNSVTPTDSCEPAPECSSLEQEELQALQIEQGESSQNGTVLMEETAYPALEETSSTIEAEEQKIPEDSIYIGTASDDSDIVTLEPPKLEEIGNQEVVIVEEAQSSEDFNMGSSSSSQYTFCQPETVFSSQPSDDESSSDETSNQPSPAFRRRRARKKTVSASESEDRLVAEQETEPSKELSKRQFSSGLNKCVILALVIAISMGFGHFYGTIQIQKRQQLVRKIHEDELNDMKDYLSQCQQEQESFIDYKSLKENLARCWTLTEAEKMSFETQKTNLATENQYLRVSLEKEEKALSSLQEELNKLREQIRILEDKGTSTELVKENQKLKQHLEEEKQKKHSFLSQRETLLTEAKMLKRELERERLVTTALRGELQQLSGSQLHGKSDSPNVYTEKKEIAILRERLTELERKLTFEQQRSDLWERLYVEAKDQNGKQGTDGKKKGGRGSHRAKNKSKETFLGSVKETFDAMKNSTKEFVRHHKEKIKQAKEAVKENLKKFSDSVKSTFRHFKDTTKNIFDEKGNKRFGATKEAAEKPRTVFSDYLHPQYKAPTENHHNRGPTMXNDGRKEKPVHFKEFRKNTNSKKCSPGHDCRENSHSFRKACSGVFDCAQQESMSLFNTVVNPIRMDEFRQIIQRYMLKELDTFCHWNELDQFINKFFLNGVFIHDQKLFTDFVNDVKDYLRNMKEYEVDNDGVFEKLDEYIYRHFFGHTFSPPYGPRSVYIKPCHYSSL

SEQ ID NO: 860 - protein, 184 aa, Homo sapiens
  SITE (174): Xaa equals any of the naturally occurring L-amino acids
AGVHTISFLGGLALNEGVNWLIKNVIQEPRPCGGPHTAVGTKYGMPSSHSQFMWFFSVYSFLFLYLRMHQTNNARFLDLLWRHVLSLGLLAVAFLVSYSRVYLLYHTWSQVLYGGIAGGLMAIAWFIFTQEVLTPLFPRIAAWPVSEFFLIRDTSLIPNVLWFEYTVTRAEARXRQRKLGTKLQ

SEQ ID NO: 861 - protein, 360 aa, Homo sapiens
  SITE (53): Xaa equals any of the naturally occurring L-amino acids
  SITE (360): Xaa equals any of the naturally occurring L-amino acids
LPQAQGDQFPWEQAEGQAPGEDGQRLPDQIHPGVPARRRPWWRERARAVRGLXEGREPEKRRERKQRREGGDGEEQDVGDAGRLLLRVLHVSENPVPLTVRVSPEVRDVRPYIVGAVVRGMDLQPGNALKRFLTSQTKLHEDLCEKRTAATLATHELRAVKGPLLYCARPPQDLKIVPLGRKEAKAKELVRQLQLEAEEQRKQKKRQSVSGLHRYLHLLDGNENYPCLVDADGDVISFPPITNSEKTKVKKTTSDLFLEVTSATSLQICKDVMDALILKMAEMKKYTLENKEEGSLSDTEADAVSGQLPDPTTNPSAGKDGPSLLVVEQVRVVDLEGSLKVVYPSKADLATAPPHVTVVX

SEQ ID NO: 862 - protein, 518 aa, Homo sapiens
  SITE (476): Xaa equals any of the naturally occurring L-amino acids
QYRSEFPGRPTRPAVTATAASDRMESDSDSDKSSDNSGLKRKTPALKMSVSKRARKASSDLDQASVSPSEEENSESSSESEKTSDQDFTPEKKAAVRAPRRGPLGGRKKKKAPSASDSDSKADSDGAKPEPVAMARSASSSSSSSSSSDSDVSVKKPPRGRKPAEKPLPKPRGRKPKPERPPSSSSSDSDSDEVDRISEWKRRDEARRRELEARRRREQEEELRRLREQEKEEKERRRERADRGEAERGSGGSSGDELREDDEPVKKRGRKGRGRGPPSSSDSEPEAELEREAKKSAKKPQSSSTEPARKPGQKEKRVRPEEKQQAKPVKVERTRKRSEGFSMDRKVEKKKEPSVEEKLQKLHSEIKFALKVDSPDVKRCLNALEELGTLQVTSQILQKNTDVVATLKKIRRYKANKDVMEKAAEVYTRLKSRVLGPKIEAVQKVNKAGMEKEKAEEKLAGEELAGEEAPQEKGGXQAQHRSLSPSEWRGHITEGGERRGQGARGGSGLGGGAKVWLL

SEQ ID NO: 863 - protein, 438 aa, Homo sapiens
VKGQGRGSRGATHALEIWVIASGRSASPTPQTRAADDPAAAMALLRGVFVVAAKRTPFGAYGGLLKDFTATDLSEFAAKAALSAGKVSPETVDSVIMGNVLQSSSDAIYLARHVGLRVGIPKETPALTINRLCGSGFQSIVNGCQEICVKEAEVVLCGGTESMSQAPYCVRNVRFGTKLGSDIKLEDSLWVSLTDQHVQLPMAMTAENLAVKHKISREECDKYALQSQQRWKAANDAGYFNDEMAPIEVKTKKGKQTMQVDEHARPQTTLEQLQKLPPVFKKDGTVTAGNASGVADGAGAVIIASEDAVKKHNFTPLARIVGYFVSGCDPSIMGIGPVPAISGALKKAGLSLKDMDLVEVNEAFAPQYLAVERSLDLDISKTNVNGGAIALGHPLGGSGSRITAHLVHELRRRGGKYAVGSACIGGGQGIAVIIQSTA

SEQ ID NO: 864 - protein, 214 aa, Homo sapiens
  SITE (138): Xaa equals any of the naturally occurring L-amino acids
TLFDFISLYLSTNTKKVIYLDDDVIVQGDIQELYDTTLALGHAAAFSDDCDLPSAQDINRLVGLQNTYMGYLDYRKKAIKDLGISPSTCSFNPGVIVANMTEWKHQRITKQLEKWMQKNVEENLYSSSLGGGVATSPXLIVFHGKYSTINPLWHIRHLGWNPDARYSEHFLQEAKLLHWNGRHKPWDFPSVHNDLWESWFVPDPAGIFKLNHHS

SEQ ID NO: 865 - protein, 165 aa, Homo sapiens
  SITE (134): Xaa equals any of the naturally occurring L-amino acids
  SITE (139): Xaa equals any of the naturally occurring L-amino acids
  SITE (140): Xaa equals any of the naturally occurring L-amino acids
  SITE (142): Xaa equals any of the naturally occurring L-amino acids
GSTHASDHIPPLKKPLGAQLITMDWTWRFLFVVAAATGVQSQVQLVQSGAEVKKPGSSVKVSCKASGGTFSSYAISWVRQAPGQGLEWMGGIIPIFGTANYAQKFQGRVTITADESTSTAYMELSSLRSEDTAXYYCAXXPXAGYLSQLLPRYGRLGPRDHGHRL

SEQ ID NO: 866 - protein, 87 aa, Homo sapiens
KQHYIAVLYYSVYDVCENARFKMMYLFLVKNKKFYAILLIKCKCDLVQFTKITDIFHYIETVTVRIGHKHQLLPASGKLLNRTAVMS

SEQ ID NO: 867 - protein, 101 aa, Homo sapiens
FFQKIMLSFHEEQEVLPETFLANFPSLIKMDIHKKVTDPSVAKSMMACLLSSLKANGSRGAFCEVRPDDKRILEFYSKLGCFEIAKMEGFPKDVVILGRSL

SEQ ID NO: 868 - protein, 82 aa, Homo sapiens
LLPGSALPGACPRRWYGSYLVWKELGGFTEKAVVPLGLYTGQLALNWAWPPIFFGARQMGWALVDLLLVSGAAAALPWPGTR

SEQ ID NO: 869 - protein, 562 aa, Homo sapiens
  SITE (18): Xaa equals any of the naturally occurring L-amino acids
  SITE (23): Xaa equals any of the naturally occurring L-amino acids
LKPEPDDLIDEDLNFVQXNPLSXKKPTVTLTYGSSRPSIEIYRPPASRNADSGVHLNRLQFQQQQNSIHAAKQLDMQSSWVYETGRLCEPEVLNSLEETYSPFFRNNSEKMSMEDENFRKRKLPVVSSVVKVKKFNHDGEEEEEDDDYGSRTGSISSSVSVPAKPERRPSLPPSKQANKNLILKAISEAQESVTKTTNYSTVPQKQTLPVAPRTRTSQEELLAEVVQGQSRTPRISPPIKEEETKGDSVEKNQGTQQRQLLSRLQIDPVMAETLQMSQDYYDMESMVHADTRSFILKKPKLSEEVVVAPNQESGMKTADSLRVLSGHLMQTRDLVQPDKPASPKFIVTLDGVPSPPGYMSDQEEDMCFEGMKPVNQTAASNKGLRGLLHPQQLHLLSRQLEDPNGSFSNAEMSELSVAQKPEKLLERCKYWPACKNGDECAYHHPISPCKAFPNCKFAEKCLFVHPNCKYDAKCTKPDCPFTHVSRRIPVLSPKPVAPPAPPSSSQLCRYFPACKKMECPFYHPKHCRFNTQCTRPDCTFYHPTINVPPRHALKWIRPQTSE

SEQ ID NO: 870 - protein, 191 aa, Homo sapiens
PNGSSNVCVSLCVFVCVCALKTSNSLEAWGGIPALPLACLMHHQMTRTTLMTKQHELGGLLALVQNCQSEMNIKDSRAVGLSVKRLCISFVDEFCERTERPLYLAQGLFMKRETYWEVQDSGISPLLLLLSTALDCSPEAETRQSPGGRKMLQEPTLSMSLQILTGFLWVQLWNWETFLRIRTHSTDASCP

SEQ ID NO: 871 - protein, 75 aa, Homo sapiens
LFKVSNVHPGLGITNVGVKMPTKGFSALEVLRSPICIKADPFCKDLSFRTFSVLLVRTLEVILIISTDSLTAEAT

SEQ ID NO: 872 - protein, 203 aa, Homo sapiens [sequence omitted]

SEQ ID NO: 873 - protein, 66 aa, Homo sapiens
SLQPLPPRFKQFLCLSLPSNWDYRCTLPHLADFFYVLVETGFQPCCPGWSQTPELRQSTRLGLPKC

SEQ ID NO: 874 - protein, 231 aa, Homo sapiens
VKLKEEFSLSGRIIDCAFTVTFNPKYDTLLKAVKDATNTGIKCAGIDVRLCDVGEAIQEVMESYEVEIDGKTYQVKPIRNLNGHSIGQYRIHAGKTVPIVKGGEATRMEEGEVYAIETFGSTGKGVVHDDMECSHYMKNFDVGHVPIRLPRTKHLLNVINENFGTLAFCRRWLDRLGESKYLMALKNLCDLGIVDPYPPLCDIKGSYTAQFEHTILLRPTCKEVVSRGDDY

SEQ ID NO: 875 - protein, 88 aa, Homo sapiens
CLYYQVLSTILITNCDKFFLFFFPLPHYFLMNKPKIHGEQLQCWLIYLLCTGNLKRTVDSFRSVTGAVIIAIHLLVVLHLFHASFLNV

SEQ ID NO: 876 - protein, 330 aa, Homo sapiens
  SITE (97): Xaa equals any of the naturally occurring L-amino acids
  SITE (106): Xaa equals any of the naturally occurring L-amino acids
  SITE (124): Xaa equals any of the naturally occurring L-amino acids
  SITE (138): Xaa equals any of the naturally occurring L-amino acids
  SITE (174): Xaa equals any of the naturally occurring L-amino acids
  SITE (178): Xaa equals any of the naturally occurring L-amino acids
  SITE (194): Xaa equals any of the naturally occurring L-amino acids
NSARAVQGLLEVAKDSIPRSHWKKTPVVLKATAGLRLLPEHKAKALLFEVKEIFRKSPFLVPKGSVSIMDGSDEGILAWVTVNFLTGQLHGHRQETXGTLDLGGAXTQITFLPQFEKTLEQTPXGYLTSFEMFNSTYXLYTHSYLGFGLKAARLATLGALETEGTDGHTFRSAXLPRXLEAEWIFGGVKYQYGXNQEGEVGFEPCYAEVLRVVRGKLHQPEEVQRGSFYAFSYYYDRAVDTDMIDYEKGGILKVEDFERKAREVCDNLENFTSGSPFLCMDLSYITALLKDGFGFADSTVLQLTKKVNNIETGWALGATFHLLQSLGISH

SEQ ID NO: 877 - protein, 102 aa, Homo sapiens
  SITE (100): Xaa equals any of the naturally occurring L-amino acids
DLHSQWGTWPPILGDLRKRTSPWGEGWVGPEGPVPSSVLRGRATCSNGICILAPLHLLSPAESFPSKPKSCHCFFLPGKNAWTLPGDRLKPEQCHTLALXPC

SEQ ID NO: 878 - protein, 135 aa, Homo sapiens
TLESKADTEASRLQEYRSQVLSVGLGCVSWGKKNCEKPQSSIFTVTHGRSLNCLVNKNESLSQRKPRQYPSSTTCENPDVPQQRKTLQAGKMRRFFFFVSMMIFAATWLWRAADTPSYSRGCFLEADSVCSLVEL

SEQ ID NO: 879 - protein, 175 aa, Homo sapiens
  SITE (168): Xaa equals any of the naturally occurring L-amino acids
VICMWQGCAVERPVGRMTSQTPLPQSPRPRRPTMSTVVELNVGGEFHTTTLGTLRKFPGSKLAEMFSSLAKASTDAEGRFFIDRPSTYFRPILDYLRTGQVPTQHIPEVYREAQFYEIKPLVKLLEDMPQIFGEQVSRKQFLLQCRATARTWELMVRLARAEAITARXSRCLCAW

SEQ ID NO: 880 - protein, 397 aa, Homo sapiens
  SITE (311): Xaa equals any of the naturally occurring L-amino acids
WEYDMARELRALLLWGRRLRPLLRAPALAAVPGGKPILCPRRTTAQLGPRRNPAWSLQAGRLFSTQTAEDKEEPLHSIISSTESVQGSTSKHEFQAETKKLLDIVARSLYSEKEVFIRELISNASDALEKLRHKLVSDGQALPEMEIHLQTNAEKGTITIQDTGIGMTQEELVSNLGTIARSGSKAFLDALQNQAEASSKIIGQFGVGFYSAFMVADRVEVYSRSAAPGSLGYQWLSDGSGVFEIAEASGVRTGTKIIIHLKSDCKEFSSEARVRDVVTKYSNFVSFPLYLNGRRMNTLQAIWMMDPKDVXEWQHEEFYRYVAQAHDKPRYTLHYKTDAPLNIRSIFYVPDMKPSMFDVSRELGSSVCTVQPQSPHPDQGHGHPAQVAALHPRCGGQ

SEQ ID NO: 881 - protein, 187 aa, Homo sapiens
ISLFPPPGPQLCLPDKEGQHSKSRSAIYLPVRSTNSSVRKMAGNSILLAAVSILSACQQSYFALQVGKARLKYKVTPPAVTGSPEFERVFRAQQNCVEFYPIFIITLWMAGWYFNQVFATCLGLVYIYGRHLYFWGYSEAAKKRITGFRLSLGILALLTLLGALGIANSFLDEYLDLNIAKKLRRQF

SEQ ID NO: 882 - protein, 128 aa, Homo sapiens
  SITE (96): Xaa equals any of the naturally occurring L-amino acids
  SITE (112): Xaa equals any of the naturally occurring L-amino acids
TTNIQQGHFLKRESAFNEMTMVDTEMPFWPTNFGISSVDLSVMEDHSHSFDIKPFTTVDFSSISTPHYEDIPFTRTDPVVADYKYDLKLQEYQSAXKVEPASPPYYSEKTQXYNKPHEEPSNSLMAIE

SEQ ID NO: 883 - protein, 81 aa, Homo sapiens
  SITE (9): Xaa equals any of the naturally occurring L-amino acids
  SITE (22): Xaa equals any of the naturally occurring L-amino acids
SNEFITNFXQALSGYCGFMAAXLYARSIFGEDALANVSIEKPIHQGPDAAVTGHIRIRAKSQGMALSLGDKINLSQKKTSI

SEQ ID NO: 884 - protein, 293 aa, Homo sapiens
GANNGGSKLTQTPKLQELMKVLIDWINDVLVGERIIVKDLAEDLYDGQVLQKLFEKLESEKLNVAEVTQSEIAQKQKLQTVLEKINETLKLPPRSIKWNVDSVHAKSLVAILHLLVALSQYFRAPIRLPDHVSIQVVVVQKREGILQSRQIQEEITGNTEALSGRHERDAFDTLFDHAPDKLNVVKKTLITFVNKHLNKLNLEVTELETQFADGVYLVLLMGLLEGYFVPLHSFFLTPDSFEQKVLNVSFAFELMQDGGLEKPKPRPEDIVNCDLKSTLRVLYNLFTKYRNVE

SEQ ID NO: 885 - protein, 116 aa, Homo sapiens
YVYLIILPLAKCYVCKMWHLLVFIVCVFFVYYTLGNFVLPKKKKKGSVMSDTQEKQISVVSLKYNFKGHYQQQGFFYTLKTLCYISLPFSYFGVLLLLYNGINGNVIQPLNCHYYI

SEQ ID NO: 886 - protein, 80 aa, Homo sapiens
YEHLFYKFYKSMLNLRKTKQVCLYSQKLCHLSQYDFNMCINGKQGKVFSNITVLLGNLCRVHINASYITLICFLCWPYRG

SEQ ID NO: 887 - protein, 416 aa, Homo sapiens
TFPPEFVIPLSEVTCETGETVVLRCRVCGRPKASITWKGPEHNTLNNDGHYSISYSDLGEATLKIVGVTTEDDGIYTCIAVNDMGSASSSASLRVLGPGMDGIMVTWKDNFDSFYSEVAELGRGRFSVVKKCDQKGTKRAVATKFVNKKLMKRDQVTHELGILQSLQHPLLVGLLDTFETPTSYILVLEMADQGRLLDCVVRWGSLTEGKIRAHLGEVLEAVRYLHNCRIAHLDLKPENILVDESLAKPTIKLADFGDAVQLNTTYYIHQLLGNPEFAAPEIILGNPVSLTSDTWSVGVLTYVLLSGVSPFLDDSVEETCLNICRLDFSFPDDYFKGVSQKAKEFVCFSCRRTPPSVPRLRWPSRSSGCRPATAESTGVLDTSRLTSFIERRKHQNDVRPIRSIKNFLQSRLLPRV

SEQ ID NO: 888 - protein, 368 aa, Homo sapiens
  SITE (196): Xaa equals any of the naturally occurring L-amino acids
RQRRKGGQERGRRGKMAATKRKRRGGFAVQAKKPKRNEIDAEPPAKRHATAEEVEEEERDRIPGPVCKGKWKNKERILIFSSRGINFRTRHLMQDLRMLMPHSKADTKMDRKDKLFVINEVCEMKNCNKCIYFEAKKKQDLYMWLSNSPHGPSAKFLVQNIHTLAELKMTGNCLKGSRPLLSFDPAFDELPHYALXKELLIQIFSTPRYHPKSQPFVDHVFTFTILDNRIWFRNFQIIEEDAALVEIGPRFVLNLIKIFQGSFGGPTLYENPHYQSPNMHRRVIRSITAAKYREKQQVKDVQKLRKKEPKTLLPHDPTADVFVTPAEEKPIEIQWVKPEPKVDLKARKKRIYKRQRKMKQRMDSGKTK

SEQ ID NO: 889 - protein, 273 aa, Homo sapiens
  SITE (32): Xaa equals any of the naturally occurring L-amino acids
LASAWCSCARVSAGSALRFPGMESEMETQSAXAEEGFTQVTRKGGRRAKKRQAEQLSAAGEGGDAGRMDTEEARPAKRPVFPPLCGDGLLSGKEETRKIPVPANRYTPLKENWMKIFTPIVEHLGLQIRFNLKSRNVEIRTCKETKDVSALTKAADFVKAFILGFQVEDALALIRLDDLFLESFEITDVKPLKGDHLSRAIGRIAGKGGKTKFTIENVTRTRIVLADVKVHILGSFQNIKMARTAICNLILGNPPSKVYGNIRAVASRSADRF

SEQ ID NO: 890 - protein, 60 aa, Homo sapiens
VTSKTQVGLFKFLKFEIFYLQKIVLCFIISQMSVRFLSTNDHASIFFSFKPPNQYFSFKF

SEQ ID NO: 891 - protein, 257 aa, Homo sapiens
  SITE (224): Xaa equals any of the naturally occurring L-amino acids
ARGAVTRFPPRSLGRCHGFGVGDRAVTMARLALSPVPSHWMVALLLLLSAAEPVPAARSEDRYRNPKGSACSRIWQSPRFIARKRGFTVKMHCYMNSASGNVSWLWKQEMDENPQQLKLEKGRMEESQNESLATLTIQGIRFEDNGIYFCQQKCNNTSEVYQGCGTELRVMGFSTLAQLKQRNTLKDGIIMIQTLLIILFIIVPIFLLLDKDDSKAGMEEDHTXEGLDIDQTATYEDIVTLRTGEVKWSVGEHPGQE

SEQ ID NO: 892 - protein, 52 aa, Homo sapiens
CHSCYQAVPLPGVHIGLTGLSIFLFLIFEFYHLALNCSTWIWGSSLCPKDLL

SEQ ID NO: 893 - protein, 50 aa, Homo sapiens [sequence omitted]

SEQ ID NO: 894 - protein, 255 aa, Homo sapiens
APSARDVSRCAHRARPGAIMLLLPSAADGRGTAITHALTSASTLCQVEPVGRWFEAFVKRRNRNASASFQELEDKKELSEESEDEELQLEEFPMLKTLDPKDWKNQDHYAVLGLGHVRYKATQRQIKAAHKAMVLKHHPDKRKAAGEPIKEGDNDYFTCITKAYEMLSDPVKRRAFNSVDPTFDNSVPSKSEAKDNFFEVFTPVFERNSRWSNKKNVPKLGDMNSSFEDVDIFYSFWYNFDSWREFSYLDEEEKK

SEQ ID NO: 895 - protein, 149 aa, Homo sapiens
VENQNPADPLNEELGDEDSEKKRKGAFFSWSRTRSTGRSQKKREHGDHADDALHANGGLCRRESQGSVSSAGSLDLSEACRTLAPEKDKATKHCCIHLPDGTSCVVAVKAGFSIKDILSGLCERHGINGAAADLFLVGGDKPLVLAPRQ

SEQ ID NO: 896 - protein, 635 aa, Homo sapiens
HERGQRAHSADARAAGSTRSTAGAGLGQRLRCCWIVVFSGIEDTHQKPKMPKPINVRVTTMDAELEFAIQPNTTGKQLFDQVVKTIGLREVWYFGLHYVDNKGFPTWLKLDKKVSAQEVRKENPLQFKFRAKFYPEDVAEELIQDITQKLFFLQVKEGILSDEIYCPPETAVLLGSYAVQAKFGDYNKEVHKSGYLSSERLIPQRVMDQHKLTRDQWEDRIQVWHAEHRGMLKDNAMLEYLKIAQDLEMYGINYFEIKNKKGTDLWLGVDALGLNIYEKDDKLTPKIGFPWSEIRNISFNDKKFVIKPIDKKAPDFVFYAPRLRINKRILQLCMGNHELYMRRRKPDTIEVQQMKAQAREEKHQKQLERQQLETEKKRRETVEREKEQMMREKEELMLRLQDYEEKTKKAERELSEQIQRALQLEEERKRAQEEAERLEADRMAALRAKEELERQAVDQIKSQEQLAAELAEYTAKIALLEEARRRKEDEVEEWQHRAKEAQDDLVKTKEELHLVMTAPPPPPPPVYEPVSYHVQESLQDEGAEPTGYSAELSSEGIRDDRNEEKRITEAEKNERVQRQLLTLSSELSQARDENKRTHNDIIHNENMRQGRDKYKTLRQIRQGNTKQRIDEFEAL

SEQ ID NO: 897 - protein, 41 aa, Homo sapiens
  SITE (12): Xaa equals any of the naturally occurring L-amino acids
  SITE (21): Xaa equals any of the naturally occurring L-amino acids
  SITE (26): Xaa equals any of the naturally occurring L-amino acids
  SITE (29): Xaa equals any of the naturally occurring L-amino acids
  SITE (30): Xaa equals any of the naturally occurring L-amino acids
  SITE (37): Xaa equals any of the naturally occurring L-amino acids
FVFLGYEEIIIXLVSIFINPXILYLXKSXXGGGRPCXDLPI

SEQ ID NO: 898 - protein, 128 aa, Homo sapiens
  SITE (83): Xaa equals any of the naturally occurring L-amino acids
  SITE (92): Xaa equals any of the naturally occurring L-amino acids
SLAGRSRWMEANQHSLNILGQKVSMHYSDPKPKINEDWLCNKCGVQNFKRREKCFKCGVPKSEAEQKLPLGTRLDQQTLPLGXRELSQGLLXLPQPYQAQGVLASQALSQGSEPSSENANDTIILRNL

SEQ ID NO: 899 - protein, 92 aa, Homo sapiens
IWQFFAEVIMSFFQLLMKRKELIPLVVFMTVAAGGASSFAVYSLWKTDVILDRKKNPEPWETVDPTVPQKLITINQQWKPIEELQNVQRVTK

SEQ ID NO: 900 - protein, 73 aa, Homo sapiens
GGWFYPFCLLFGTQLVFFGLLSSGSRAVLSNTVTTCGCLKLSQLKSHKIKNSFLSCTNHVSRGVTVCSSWLLY

SEQ ID NO: 901 - protein, 120 aa, Homo sapiens
GPALKMQAQAPVVVVTQPGVGPGPAPQNSNWQTGMCDCFSDCGVCLCGTFCFPCLGCQVAADMNECCLCGTSVAMRTLYRTRYGIPGSICDDYMATLCCPHCTLCQIKRDINRRRAMRTF

SEQ ID NO: 902 - protein, 163 aa, Homo sapiens
  SITE (1): Xaa equals any of the naturally occurring L-amino acids
XEPKPSVEPVKSISSMELKTEPFDDFLFPASSRPSGSETARSVPDMDLSGSFYAADWEPLHSGSLGMGPMAQSWSPCALRWSPVLPAALLTRLPSSSPTPRLTPSPAVQLPTARAAAAMSLPLTRSAHPRCWPCEGAGKGRQPAPTSATARAGALQRGETHLP

SEQ ID NO: 903 - protein, 478 aa, Homo sapiens
  SITE (20): Xaa equals any of the naturally occurring L-amino acids
  SITE (24): Xaa equals any of the naturally occurring L-amino acids
  SITE (451): Xaa equals any of the naturally occurring L-amino acids
ADTKPERGVSSAVFASGSEXRRLXCVLLSSSETRLLSGTLLWIPRAYSTRSKMAELNTHVNVKEKIYAVRSVVPNKSNNEIVLVLQQFDFNVDKAVQAFVDGSAIQVLKEWNMTGKKKNNKRKRSKSKQHQGNKDAKDKVERPEAGPLQPQPPQIQNGPMNGCEKDSSSTDSANEKPALIPREKKISILEEPSKALRGVTGPNIEKSVKDLQRCTVSLTRYRVMIKEEVDSSVKKIKAAFAELHNCIIDKEVSLMAEMDKVKEEAMEILTARQKKAEELKRLTDLASQMAEMQLAELRAEIKHFVSERKYDEELGKAARFSCDIEQLKAQIMLCGEITHPKNNYSSRTPCSSLLPLLNAHAATSGKQSNFSRKSSTHNKPSEGKAANPKMVSSLPSTADPSHQTMPANKQNGSSNQRRRFNPQYHNNRLNGPAKSQGSGNEAEPLGKGNSXHEHRRQPHNGFRPKNKGGAKIKRLPWG

SEQ ID NO: 904 - protein, 88 aa, Homo sapiens
AFHFGSVAKATTTSVGTVGYYQFMDRLLSGMVTANTIVRKPKRSLVRVESVTPLPTTGCCLLSLRRLRQNLLQRTRRVVYQRCLTTLR

SEQ ID NO: 905 - protein, 508 aa, Homo sapiens
FRIVLPGWQQGPSGTMSALGVTVALLVWAAFLLLVSMWRQVHSSWNLPPGPFPLPIIGNLFQLELKNIPKSFTRLAQRFGPVFTLYVGSQRMVVMHGYKAVKEALLDYKDEFSGRGDLPAFHAHRDRGIIFNNGPTWKDIRRFSLTTLRNYGMGKQGNESRIQREAHFLLEALRKTQGQPFDPTFLIGCAPCNVIADILFRKHFDYNDEKFLRLMYLFNENFHLLSTPWLQLYNNFPSFLHYLPGSHRKVIKNVAEVKEYVSERVKEHHQSLDPNCPRDLTDCLLVEMEKEKHSAERLYTMDGITVTVADLFFAGTETTSTTLRYGLLILMKYPEIEEKLHEEIDRVIGPSRIPAIKDRQEMPYMDAVVHEIQRFITLVPSNLPHEATRDTIFRGYLIPKGTVVVPTLDSVLYDNQEFPDPEKFKPEHFLNENGKFKYSDYFKPFSTGKRVCAGEGLARMELFLLLCAILQHFNLKPLVDPKDIDLSPIHIGFGCIPPRYKLCVIPRS

SEQ ID NO: 906 - protein, 290 aa, Homo sapiens
LGPRPLALERGLRGTHMENVYDFYKPNLASEYPIVDGKLSIQCYLRALDRCYTSYRKKIQNQWKQAGSDRPFTLDDLQYMIFHTPFCKMVQKSLARLMFNDFLSASSDTQTSLYKGLEAFGGLKLEDTYTNKDLDKALLKASQDMFDKKTKASLYLSTHNGNMYTSSLYGCLASLLSHHSAQELAGSRIGAFSYGSGLAASFFSFRVSQDAAPGSPLDKLVSSTSDLPKRLASRKCVSPEEFTEIMNQREQFYHKVNFSPPGDTNSLFPGTWYLERVDEQHRRKYARRPV

SEQ ID NO: 907 - protein, 242 aa, Homo sapiens
  SITE (198): Xaa equals any of the naturally occurring L-amino acids
  SITE (215): Xaa equals any of the naturally occurring L-amino acids
  SITE (222): Xaa equals any of the naturally occurring L-amino acids
  SITE (242): Xaa equals any of the naturally occurring L-amino acids
LVPNSARVGTRSKGVCVHGNAEYQPGSPVYSSKCQDCVCTDKVDNNTLLNVIACTHVPCNTSCSPGFELMEAPGECCKKCEQTHCIIKRPDNQHVILKPGDFKSDPKNNCTFFSCVKIHNQLISSVSNITCPNFDASICIPGSITFMPNGCCKTCTPRNETRVPCSTVPVTTEVSYAGCTKTVLMNHCSGSCGTFVMXSAKARPWTTACSCCKEXKTSQREXVLTAQWRSLTHTYTTSRLPX

SEQ ID NO: 908 - protein, 119 aa, Homo sapiens
LGLAPALGPASRRSREMSDCYTELEKAVIVLVENFYKYVSKYSLVKNKISKSSFREMLQKELNHMLSDTGNRKAADKLIQNLDANHDGRISFDEYWTLIGGITGPIAKLIHEQEQQSSS

SEQ ID NO: 909 - protein, 171 aa, Homo sapiens
  SITE (162): Xaa equals any of the naturally occurring L-amino acids
LIACHFQVHFLFIFMFMVDCTFPSPPSGMGGGGEGGPWALQSHLSREIPFGTGGRKAARRQQPWLLSFGRLGKGLPPALGFQGLTGGVEREGGTSITLKVESSYFLRCEGFFISLFSECQGSEVPLTVNLWWAGAGGEGGGLAPSLPAFCCPCLTMPANWRXHGCTSIPPE

SEQ ID NO: 910 - protein, 46 aa, Homo sapiens
  SITE (27): Xaa equals any of the naturally occurring L-amino acids
GSPTETLLRLLLPLDSQVRPSSQRSAXAVGRPRRGRSEGLTKPSNR

SEQ ID NO: 911 - protein, 1242 aa, Homo sapiens
  SITE (224): Xaa equals any of the naturally occurring L-amino acids
  SITE (1013): Xaa equals any of the naturally occurring L-amino acids
  SITE (1034): Xaa equals any of the naturally occurring L-amino acids
APHLTLRPCGCCSGAGLLPGQGPGIMYIKQVIIQGFRSYRDQTIVDPFSSKHNVIVGRNGSGKSNFFYAIQFVLSDEFSHLRPEQRLALLHEGTGPRVISAFVEIIFDNSDNRLPIDKEEVSLRRVIGAKKDQYFLDKKMVTKNDVMNLLESAGFSRSNPYYIVKQGKINQMATAPDSQRLKLLREVAGTRVYDERKEESISLMKETEGKREKINELLKYIEEXLHTLEEEKEELAQYQKWDKMRRALEYTIYNQELNETRAKLDELSAKRETSGEKSRQLRDAQQDARDKMEDIERQVRELKTKISAMKEEKEQLSAERQEQIKQRTKLELKAKDLQDELAGNSEQRKRLLKERQKLLEKIEEKQKELAETEPKFNSVKEKEERGIARLAQATQERTDLYAKQGRGSQFTSKEERDKWIKKELKSLDQAINDKKRQIAAIHKDLEDTEANKEKNLEQYNKLDQDLNEVKARVEELDRKYYEVKNKKDELQSERNYLWREENAEQQALAAKREDLEKKQQLLRAATGKAILNGIDSINKVLDHFRRKGINQHVQNGYHGIVMNNFECEPAFYTCVEVTAGNRLFYHIVDSDEVSTKILMEFNKMNLPGEVTFLPLNKLDVRDTAYPETNDAIPMISKLRYNPRFDKAFKHVFGKTLICRSMEVSTQLARAFTMDCITLEGDQVSHRGALTGGYYDTRKSRLELQKDVRKAEEELGELEAKLNENLRRNIERINNEIDQLMNQMQQIETQQRKFKASRDSILSEMKMLKEKRQQSEKTFMPKQRSLQSLEASLHAMESTRESLKAELGTDLLSQLSLEDQKRVDALNDEIRQLQQENRQLLNERIKLEGIITRVETYLNENLRKRLDQVEQELNELRETEGGTVLTATTSELEAINKRVKDTMARSEDLDNSIDKTEAGIKELQKSMERWKNMEKEHMDAINHDTKELEKMTNRQGMLLKKKEECMKKIRELGSLPQEAFEKYQTLSLKQLFRKLEQCNTELKKYSHVNKKALXQFVNFSEQKEKLIKRQEELDXGYKSIMELMNVLELRKYEAIQLTFKQVSKNFSEVFQKLVPGGKATLVMKKGDVEGSQSQDEGEGSGESERGSGSQSSVPSVDQFTGVGIRVSFTGKQGEMREMQQLSGGQKSLVALALIFAIQKCDPAPFYLFDEIDQALDAQHRKAVSDMIMELAVHAQFITTTFRPELLESADKFYGVKFRNKVSHIDVITAEMAKDFVEDDTTHG

SEQ ID NO: 912 - protein, 172 aa, Homo sapiens
  SITE (109): Xaa equals any of the naturally occurring L-amino acids
  SITE (143): Xaa equals any of the naturally occurring L-amino acids
  SITE (158): Xaa equals any of the naturally occurring L-amino acids
EEKTEPPLSFGRGWQTVKEMSVLRHVGIGSDAPPMERFVNTKTWKVRGLSTKRHGRLGLSTQRHGRLEVCQHKDTGRMGCRRFRCFPFGHILLSWRTRFKTAWVGKLEXSWMQWAPCLLIPTLLGGSRQERSLGPKKSNLPAXLKIHTTCTPTLGFNXNQNPFLRKKKKKKK

SEQ ID NO: 913 - protein, 205 aa, Homo sapiens [sequence omitted]

SEQ ID NO: 914 - protein, 198 aa, Homo sapiens
ILQVPVRNSRVYPRVRVRNVPWEFGDVIPDYVLGQSTCALFLSLRYHNLHPDYIHGRLQSLGKNFALRVLLVQVDVKDPQQALKELAKMCILADCTLILAWSPEEAGRYLETYKAYEQKPADLLMEKLEQDFVSRVTECLTTVKSVNKTDSQTLLTTFGSLEQLIAASREDLALCPGLGPQKARRLFDVLHEPFLKVP

SEQ ID NO: 915 - protein, 300 aa, Homo sapiens
  SITE (70): Xaa equals any of the naturally occurring L-amino acids
GTVDIESLTGYRTYRCAHPLATLFKILASFYISLVIFYGLICMYTLWWMLRRSLKKYSFESIREESSYSXIPDVKNDFAFMLHLIDQYDPLYSKRFAVFLSEVSENKLRQLNLNNEWTLDKLRQRLTKNAQDKLELHLFMLSGIPDTVFDLVELEVLKLELIPDVTIPPSIAQLTGLKELWLYHTAAKIEAPALAFLRENLRALHIKFTDIKEIPLWIYSLKTLEELHLTGNLSAENNRYIVIDGLRELKRLKVLRLKSNLSKLPQVVTDVGVHLQKLSINNEGTKLIVLNSLKKMAKPD

SEQ ID NO: 916 - protein, 157 aa, Homo sapiens
QVAMGSLSGLRLAAGSCFRLCERDVSSSLRLTRSSDLKRINGFCTKPQESPGAPSRTYNRVPLHKPTDWQKKILIWSGRFKKEDEIPETVSLEMLDAAKNKMRVKISYLMIALTVVGCIFMVIEGKKAAQRHETLTSLNLEKKARLKEEAAMKAKTE

SEQ ID NO: 917 - protein, 77 aa, Homo sapiens
IKVMNKTFHPLKHFPVLRFLFVFVVSSPCYPFCPFSLTMVIWSLGSYQSPRDILQSLSPFWVDFILFYFVFFKKITF

SEQ ID NO: 918 - protein, 187 aa, Homo sapiens
  SITE (10): Xaa equals any of the naturally occurring L-amino acids
  SITE (22): Xaa equals any of the naturally occurring L-amino acids
TFAAALSSSXGCPSRAQVTTDXLPACRSCACRPAGLCTLQTTLLWFLGRAQQYLAAWDPASFLLLIQKDLPPLLHEAEALYSLASEESLALEVEQQLGLEIQKLTAQIQLLPEESLSVFSQECHKQAMQGFKLYMPRGRYWRLRLCPEPPSAPSEYAGLVVRTVLEPVLQGLQGLHLKPRPLPLVRL

SEQ ID NO: 919 - protein, 260 aa, Homo sapiens
NSRTDVRMETDLEVIIKDNSLVLTPSHIKAYMLMTLQGLEYLHQHWILHRDLKPNNLLLDENGVLKLADFGLAKSFGSPNRAYTHQVVTRWYRAPELLFGARMYGVGVDMWAVGCILAELLLRVPFLPGDSDLDQLTRIFETLGTPTEEQWPDMCSLPDYVTFKSFPGIPLHHIFSAAGDDLLDLIQGLFLFNPCARITATQALKMKYFSNAPGPTPGCQLPRPNCPVETLKEQSNPALAIKRKRTEALEQGGLPKKLIF

SEQ ID NO: 920 - protein, 345 aa, Homo sapiens
LPVRAEPTRAAAMSGDEMIFDPTMSKKKKKKKKPFMLDEEGDTQTEETQPSETKEVEPEPTEDKDLEADEEDTRKKDASDDLDDLNFFNQKKKKKKTKKIFDIDEAEEGVKDLKIESDVQEPTEPEDDLDIMLGNKKKKKKNVKFPDEDEILEKDEALEDEDNKKDDGISFSNQTGPAWAGSERDYTYEELLNRVFNIMREKNPDMVAGEKRKFVMKPPQVVRVGTKKTSFVNFTDICKLLHRQPKHLLAFLLAELGTSGSIDGNNQLVIKGRFQQKQIENVLRRYIKEYVTCHTCRSPDTILQKDTRLYFLQCETCHSRCSVASIKTGFQAVTGKRAQLRAKAN

SEQ ID NO: 921 - protein, 34 aa, Homo sapiens
PVQRKIEARSAEDSFTGFVRTLYFADTYLKECQG

SEQ ID NO: 922 - protein, 215 aa, Homo sapiens
  SITE (52): Xaa equals any of the naturally occurring L-amino acids
WIPAQDSHVPPGLSMALSWVLTVLSLLPLLEAQIPLCANLVPVPITNATLDXITGKWFYIASAFRNEEYNKSVQEIQATFFYFTPNKTEDTIFLREYQTRQDQCIYNTTYLNVQRENGTISRYVGGQEHFAHLLILRDTKTYMLAFDVNDEKNWGLSVYADKPETTKEQLGEFYEALDCLRIPKSDVVYTDWKKDKCEPLEKQHEKERKQEEGES

SEQ ID NO: 923 - protein, 358 aa, Homo sapiens
  SITE (9): Xaa equals any of the naturally occurring L-amino acids
  SITE (19): Xaa equals any of the naturally occurring L-amino acids
  SITE (25): Xaa equals any of the naturally occurring L-amino acids
CAMPIGCPXSSLGNSARLXQKQQQXAGRETSTCSLRIISAPTMATFVELSTKAKMPIVGLGTWKSPLGKVKEAVKVAIDAGYRHIDCAYVYQNEHEVGEAIQEKIQEKAVKREDLFIVSKLWPTFFERPLVRKAFEKTLKDLKLSYLDVYLIHWPQGFKSGDDLFPKDDKGNAIGGKATFLDAWEAMEELVDEGLVKALGVSNFSHFQIEKLLNKPGLKYKPVTNQVECHPYLTQEKLIQYCHSKGITVTAYSPLGSPDRPWAKPEDPSLLEDPKIKEIAAKHKKTAAQVLIRFHIQRNVIVIPKSVTPARIVENIQVFDFKLSDEEMATILSFNRNWRACNVLQSSHLEDYPFDAEY

SEQ ID NO: 924 - protein, 75 aa, Homo sapiens
  SITE (2): Xaa equals any of the naturally occurring L-amino acids
NXASMPSPQRASTRVMLSGNVRCSCHRGPPPGKCLVSSGSRPQERVPCGALGAGPDHHQDSSLGDRVNAISKNKN

SEQ ID NO: 925 - protein, 252 aa, Homo sapiens
  SITE (7): Xaa equals any of the naturally occurring L-amino acids
  SITE (50): Xaa equals any of the naturally occurring L-amino acids
  SITE (54): Xaa equals any of the naturally occurring L-amino acids
  SITE (226): Xaa equals any of the naturally occurring L-amino acids
  SITE (227): Xaa equals any of the naturally occurring L-amino acids
  SITE (229): Xaa equals any of the naturally occurring L-amino acids
  SITE (249): Xaa equals any of the naturally occurring L-amino acids
ATADKEXPGKHQKGDEVAGAGRFSERLPECGRAAVTHQWLSQYPRSSRGXHAHXVNPPYYIPLVELVPHPETAPTTVDRTHALMKKIGQCPMRVQKEVAGFVLNRLQYAIISEAWRLVEEGIVSPSDLDLVMSEGLGMRYAFIGPLETMHLNAEGMLSYCDRYSEGIKHVLQTFGPIPEFSRATAEKVNQDMCMKVPDDPEHLAARRQWRDECLMRLAKLKSQVQXXWXFPPFLFSLIAFDYILQPVIXVSW

SEQ ID NO: 926 - protein, 220 aa, Homo sapiens
RPPLSWSAGPSLAAPAAMSSEMEPLLWAWSYFRRRKFQLWPIYARRCWRSPLMTRRLLQMGIYNGQLFNNLGLCCFYAQQYDMTLTSFERALSLAENEEEAADVWYNLGHVAVGIGDTNLAHQCFRLALVNNNNHAEAYNNLAVLEMRKGHVEQARALLQTASSLAPHMYEPHFNFATISDKIGDLQRSYVAAQKSEAAFPDHVDTQHLIKQLRQHFAML

SEQ ID NO: 927 - protein, 105 aa, Homo sapiens
SSWMSISAYCHPIETLVDIFQEYPDEIEYIFKPSCVPLMRCGGCCNDEGLECVPTEESNITMQIMRIKPHQGQHIGEMSFLQHNKCECRPKKDRARQEKCDKPRR

SEQ ID NO: 928 - protein, 87 aa, Homo sapiens
  SITE (10): Xaa equals any of the naturally occurring L-amino acids
  SITE (36): Xaa equals any of the naturally occurring L-amino acids
  SITE (47): Xaa equals any of the naturally occurring L-amino acids
SSLGKLDHQXFSLDRVSLVNKGDTGNPEWTVICVGXHSGSGASDTLXPKTAPSFRLAYEMMFMCFLETRWKERGRINFLILLLLNVM

SEQ ID NO: 929 - protein, 263 aa, Homo sapiens
  SITE (252): Xaa equals any of the naturally occurring L-amino acids
  SITE (257): Xaa equals any of the naturally occurring L-amino acids
ARIGHCVEPPGAEIRMFRFMRDVEPEDPMFLMDPFAIHRQHMSRMLSGGFGYSPFLSITDGNMPGTRPASRRMQQAGAVSPFGMLGMSGGFMDMFGMMNDMIGNMEHMTAGGNCQTFSSSTVISYSNTGDGAPKVYQETSEMRSAPGGIRETRRTVRDSDSGLEQMSIGHHIRDRAHILQRSRNHRTGDQEERQDYINLDESEAAAFDDEWRRETSRFRQQRPLEFRRLESSGAGGRRRRGLPAWPSRDLRXPLSRXSRRYDW

SEQ ID NO: 930 - protein, 308 aa, Homo sapiens
  SITE (110): Xaa equals any of the naturally occurring L-amino acids
  SITE (115): Xaa equals any of the naturally occurring L-amino acids
  SITE (152): Xaa equals any of the naturally occurring L-amino acids
  SITE (225): Xaa equals any of the naturally occurring L-amino acids
GLNPGLVGLSVSYSLQVTFALNWMIRMMSDLESNIVAVERVKEYSKTETEAPWVVEGSRPPEGWPPRGEVEFRNYSVRYRPGLDLVLRDLSLHVHGGEKVGIVGRTGAGXSSMTXCLFRILEAAKGEIRIDGLNVADIGLHDLRSQLTIIPXDPILFSGTLRMNLDPFGSYSEEDIWWALELSHLHTFVSSQPAAWDFQCSEGGENLSVGQRQLVCLARALLRKXRILVLDEATAAIDLETDNLIQATIRTQFDTCTVLTIAHRLNTIMDYTRVLVLDKGVVAEFDSPANLIAARGIFYGMARDAGLA

SEQ ID NO: 931 - protein, 46 aa, Homo sapiens
RGCALSCADVQHLLYFNGIVLLDHYRTTNCQRVNTDDPDLTLNPLD

SEQ ID NO: 932 - protein, 334 aa, Homo sapiens
  SITE (127): Xaa equals any of the naturally occurring L-amino acids
  SITE (191): Xaa equals any of the naturally occurring L-amino acids
  SITE (227): Xaa equals any of the naturally occurring L-amino acids
  SITE (246): Xaa equals any of the naturally occurring L-amino acids
ERETSSLLLLGLSVCATGRKACVRLREWALSRPLTMEELEQGLLMQPWAWLQLAENSLLAKVFITKQGYALLVSDLQQVWHEQVDTSVVSQRAKELNKRLTAPPAAFLCHLDNLLRPLLKDAAHPSXATFSCDCVADALILRVRSELSGLPFYWNFHCMLASPSLVSQHLIRPLMGMSLALQCQVRELATXLHMKDLEIQDYQESGATLIRDRLKTEPFEENSFLEXFMIEKLPEACSIGDGKPFXMNLQDLYMAVTTQEVQVGQKHQGAGDPHTSNSASLQGIDSQCVNQPEQLVSSAPTLSAPEKESTGTSGPLQRPQLSKVKRKKPRGLFS

SEQ ID NO: 933 - protein, 89 aa, Homo sapiens
PSCQRPKSVSWCHVHTPCHFTLHLSPSFPMHAYSEHPCVGPSSASRACSAVGLFCGRKEAVSAFSDGTGVEGRSCIVALLNSPFCSILV

SEQ ID NO: 934 - protein, 314 aa, Homo sapiens
DPYSQSATAFNEMIQENGYNFDRSSSTFSGIKELARRFALTFGLDQLKTREAIAMLHKDGIEFAFKEPNPQGESHPPLNLAFLDILSEFSSKLLRQDKRTVYVYLEKFMTFQMSLRREDVWLPLMSYRNSLLAGGDDDTMSVISGISSRGSTVRSKKSKPSTGKRKVVEGMQLSLTEESSSSDSMWLSREQTLHTPVMMQTPQLTSTIMREPKRLRPEDSFMSVYPMQTEHHQTPLDYNRRGTSLMEDDEEPIVEDVMMSSEGRIEDLNEGMDFDTMDIDLPPSKNRRERTELKPDFFDPASIMDESVLGVSMF

SEQ ID NO: 935 - protein, 109 aa, Homo sapiens
THLIKENIFPARKVYSFSFKLSHLEGSCELAYLQVVKVPFSVLFCFVLFFSFTQPNVKVVNLGKSLVMKCESCYQIYFSDVSFLILVANKTLTFSRFIDEVKSLVCCEL

SEQ ID NO: 936 - protein, 82 aa, Homo sapiens
FGLFCTLYKWTHIMFIFWVCLLSFNIRFVGSSLLCVVLSCSLYSVPKYSILQFTHSTLDSKCFHIWAITNSAAVNIHIHIFW

SEQ ID NO: 937 - protein, 237 aa, Homo sapiens
  SITE (79): Xaa equals any of the naturally occurring L-amino acids
  SITE (85): Xaa equals any of the naturally occurring L-amino acids
FQLYEKFLHRYKMISEFTWPNHDLPSDKEAVKKLIERCGFQDDVAYGKTKIFIRTPRTLFTLEELRAQMLIRIVLFLQXVWRGTXARMRYKRTKAALTIIRYYRRYKVKSYIHEVARRFHGVKTMRDYGKHVKWPSPPKVLRRFEEALQTIFNRWRASQLIKSIPASDLPQVRAKVAAVEMLKGQRADLGLQRAWEGNYLASKPDTPQTSGTFVPVANELKRKDKYMNVLFSCHVRK

SEQ ID NO: 938 - protein, 752 aa, Homo sapiens
  SITE (748): Xaa equals any of the naturally occurring L-amino acids
ACWPAGLSRHARPLSNKMLQQVPENINFPAEEEKILEFWTEFNCFQECLKQSKHKPKFTFYDGPPFATGLPHYGHILAGTIKDIVTRYAHQSGFHVDRRFGWDCHGLPVEYEIDKTLGIRGPEDVAKMGITEYNNQCRAIVMRYSAEWKSTVSRLGRWIDFDNDYKTLYPQFMESVWWVFKQLYDKGLVYRGVKVMPFSTACNTPLSNFESHQNYKDVQDPSVFVTFPLEEDETVSLVAWTTTPWTLPSNLAVCVNPEMQYVKIKDVARGRLLILMEARLSALYKLESDYEILERFPGAYLKGKKYRPLFDYFLKCKENGAFTVLVDNYVKEEEGTGVVHQAPYFGAEDYRVCMDFNIIRKDSLPVCPVDASGCFTTEVTDFAGQYVKDADKSIIRTLKEQGRLLVATTFTHSYPFCWRSDTPLIYKAVPSWFVRVENMVDQLLRNNDLCYWVPELVREKRFGNWLKDARDWTISRNRYWGTPIPLWVSDDFEEVVCIGSVAELEELSGAKISDLHRESVDHLTIPSRCGKGSLHRISEVFDCWFESGSMPYAQVHYPFENKREFEDAFPADFIAEGIDQTRGWFYTLLVLATALFGQPPFKNVIVNGLVLASDGQKMSKRKKNYPDPVSIIQKYGADALRLYLINSPVVRAENLRFKEEGVRDVLKDVLLPWYNAYRFLIQNVLRLQKEEEIEFLYNENTVRESPNITDRWILSFMQSLIGFFETEMAGESLLVCPPRNKDYSLCNXPFDI

SEQ ID NO: 939 - protein, 104 aa, Homo sapiens
  SITE (75): Xaa equals any of the naturally occurring L-amino acids
MRRVILHSPLMSGLRVAFPDTRKTYCFDAFPSIDKISKVTSPVLVIHGTEDEVIDFSHGLAMYERCPRAVEPLWXEGAGHNDIELYAQYLERLKQFISHELPNS

SEQ ID NO: 940 - protein, 557 aa, Homo sapiens
  SITE (6): Xaa equals any of the naturally occurring L-amino acids
  SITE (19): Xaa equals any of the naturally occurring L-amino acids
  SITE (25): Xaa equals any of the naturally occurring L-amino acids
  SITE (53): Xaa equals any of the naturally occurring L-amino acids
  SITE (248): Xaa equals any of the naturally occurring L-amino acids
  SITE (273): Xaa equals any of the naturally occurring L-amino acids
  SITE (323): Xaa equals any of the naturally occurring L-amino acids
GEGGGXRRGRPAAGRPRRXRTAGRXGGTGAPAGASAHRDAGLLRERPAAGEAXGRTELSLLRFLSAELTRGYFLEHNEAKYTERRERVYTCLRIPRELEKLMVFGIFLCLDAFLYVFTLLPLRVFLALFRLLTLPCYGLRDRRLLQPAQVCDILKGVILVICYFMMHYVDYSMMYHLIRGQSVIKLYIIYNMLEVADRLFSSFGQDILDALYWTATEPKERKRAHIGVIPHFFMAVLYVFLHAILIMXQATTLNVAFNSHNKSLSTIMMSNNXVEIKGSVFKKFEKNNLFQMSNSDIKERFTNYVLLLIVCLRNMEQFSWNPXHLWVLFPDVCMVIASEIAVDIVKHAFITKFNDITADVYSEYRASLAFDLVSSRQKNAYTDYSDSVARRMGFIPLPLAVLLIRVVTSSIKVQGILSYACVILFYFGLISLKVLNSIVLLGKSCQYVKEAKMEEKLSNPPATCTPGKPSSKSQNKCKPSQGLSTEENLSASITKQPIHQKENIIPLLVTSNSDQFLTTPDGDEKDITQDNSELKHRSSKKDLLEIDRFTICGNRID

SEQ ID NO: 941 - protein, 707 aa, Homo sapiens
  SITE (265): Xaa equals any of the naturally occurring L-amino acids
  SITE (271): Xaa equals any of the naturally occurring L-amino acids
  SITE (307): Xaa equals any of the naturally occurring L-amino acids
PTRPVLPVSRCSGAFQPSVSRRSQAGSSKFPTPLGPENSGNPTLLSSAQPETRVSYWTKLLSQLLAPLPGLLQKVLIWSQLFGGMFPTRWLDFAGVYSALRALKGREKPAAPTAQKSLSSLQLDSSDPSVTSPLDWLEEGIHWQYSPPDLKLELKAKGSALDPAAQAFLLEQQLWGVELLPSSLQSRLYSNRELGSSPSGLLNIQRIDNFSVVSYLLNPSYLDCFPRLEVSYQNSDGNSEVVGFQTLTPESSCLREDHCHPQPLXAELIPXSWQGCPPLSTEGLPEIHHLRMKRLEFLQQASKGQDXPTPDQDNGYHSLEEEHSLLRMDPKHCRDNPTQFVPAAGDIPGNTQESTEEKIELLTTEVPLALEEESPSEGCPSSEIPMEKEPGEGRISVVDYSYLEGDLPISARPACSNKLIDYILGGASSDLETSSDPEGEDWDEEAEDDGFDSDSSLSDSDLEQDPEGLHLWNSFCSVDPYNPQNFTATIQTAARIVPEEPSDSEKDLSGKSDLENSSQSGSLPETPEHSSGEEDDWESSADEAESLKLWNSFCNSDDPYNPLNFKAPFQTSGENEKGCRDSKTPSESIVAISECHTLLSCKVQLLGSQESECPDSVQRDVLSGGRHTHVKRKKVTFLEEVTEYYISGDEDRKGPWEEFARDGCRFQKRIQETEDAIGYCLTFEHRERMFNRLQGTCFKGLNVLKQC

SEQ ID NO: 942 - protein, 259 aa, Homo sapiens
  SITE (67): Xaa equals any of the naturally occurring L-amino acids
  SITE (72): Xaa equals any of the naturally occurring L-amino acids
RITFSCINYSTQELLRFPKLHDAIVEVVTCLLRKRLPVTNEMVHNLVAIELAYINTKHPDFADACGXMNNNXEEQRRNRLARELPSAVSRDKVASGGGGVGDGVQEPTTGNWRGMLKTSKAEELLAEEKSKPIPIMPASPQKGHAVNLLDVPVPVARKLSAREQRDCEVIERLIKSYFLIVRKNIQDSVPKAVMHFLVNHVKDTLQSELVGQLYKSSLLDDLLTESEDMAQRRKEAADMLKALQGASQIIAEIRETHLW

SEQ ID NO: 943 - protein, 369 aa, Homo sapiens
  SITE (185): Xaa equals any of the naturally occurring L-amino acids
RCRGGRKMELGSCLEGGREAAEEEGEPEVKKRRLLCVEFASVASCDAAVAQCFLAENDWEMERALNSYFEPPVEESALERRPETISEPKTYVDLTNEETTDSTTSKISPSEDTQQENGSMFSLITWNIDGLDLNNLSERARGVCSYLALYSPDVIFLQEVIPPYYSYLKKRSSNYEIITGHEEGXFTAIMLKKSRVKLKSQEIIPFPSTKMMRNLLCVHVNVSGNELCLMTSHLESTRGHAAERMNQLKMVLKKMQEAPESATVIFAGDTNLRDREVTRCGGLPNNIVDVWEFLGKPKHCQYTWDTQMNSNLGITAACKLRFDRIFFRAAAEEGHIIPRSLDLLGLEKLDCGRFPSDHWGLLCNLDIIL

SEQ ID NO: 944 - protein, 158 aa, Homo sapiens
YIQFMVSYNPTPRLDVSSPNEAGRPEWEVHVSYHSSFYVGGCSAARRVMGVNPYILKKNMILMTNHFYAAILGYDEGILSDDHGLAAALWRTFFNRKCEDPRHLELLVEYVRKQIQYLDSMNGEDLLLTGEVSWRPLVEKNPQSILKPHSPTYNDEGL

SEQ ID NO: 945 - protein, 294 aa, Homo sapiens
  SITE (8): Xaa equals any of the naturally occurring L-amino acids
KLVPARPXDTQCRRPSRRRQIGADSCPAPTASATMSHHWGYGKHNGPEHWHKDFPIAKGERQSPVDIDTHTAKYDPSLKPLSVSYDQATSLRILNNGHAFNVEFDDSQDKAVLKGGPLDGTYRLIQFHFHWGSLDGQGSEHTVDKKKYAAELHLVHWNTKYGDFGKAVQQPDGLAVLGIFLKVGSAKPGLQKVVDVLDSIKTKGKSADFTNFDPRGLLPESLDYWTYPGSLTTPPLLECVTWIVLKEPISVSSEQVLKFRKLNFNGEGEPEELMVDNWRPAQPLKNRQIKASFK

SEQ ID NO: 946 - protein, 69 aa, Homo sapiens
KSIEQKGMHAVFQWLRHAFYSLTSIHFFTTCIKTNDLCFCHRQKQVDTGGLALLINFFSIRFSLIMLNF

SEQ ID NO: 947 - protein, 163 aa, Homo sapiens
  SITE (2): Xaa equals any of the naturally occurring L-amino acids
  SITE (8): Xaa equals any of the naturally occurring L-amino acids
  SITE (130): Xaa equals any of the naturally occurring L-amino acids
LXKGTKLXLHRGADRSRTSGSPGLQEFGTRINRIFRICNLTRPQEGYLMVQQFQYLGWASHREVPGSKRSFLKLILQVEKWQEECEEGEGRTIIHCLNGGGRSGMFCAIGIVVEMVKRAKCCRCFPCSKXTEGTASQTWWEAPEQYRFCYDVALEYLGIILVG

SEQ ID NO: 948 - protein, 87 aa, Homo sapiens
TSLKPCRNESLLLNEMLKPIKKHAVMPSFPFHRVHASPAGESHAARGNWLHSLGCCRTKRKEAAKCLYVVLNPRRIKCRGGMAKGGW

SEQ ID NO: 949 - protein, 88 aa, Homo sapiens
  SITE (49): Xaa equals any of the naturally occurring L-amino acids
  SITE (60): Xaa equals any of the naturally occurring L-amino acids
  SITE (74): Xaa equals any of the naturally occurring L-amino acids
  SITE (81): Xaa equals any of the naturally occurring L-amino acids
  SITE (84): Xaa equals any of the naturally occurring L-amino acids
PRRHRVPGSGFAFPKNENKLLPKELVFPLLFSNCEGPRGVEHGAPHKPXGWCPGYQGHAXGLDDLSLQGALVVXNWLKVTXEGXCGNW

SEQ ID NO: 950 - protein, 77 aa, Homo sapiens
WLLCPVRVFSSLTWVHFLMAHMKFGSYGLTLAMVLSYGEQHQRPVTCKLKIQCQGPSPAPLIENLLAICIFRCSRLV

SEQ ID NO: 951 - protein, 42 aa, Homo sapiens
  SITE (26): Xaa equals any of the naturally occurring L-amino acids
TSGPKSSACLSLPRCWDYKCEPLCTXFVLTYFELAPYSKAAS

SEQ ID NO: 952 - protein, 58 aa, Homo sapiens
  SITE (34): Xaa equals any of the naturally occurring L-amino acids
ARKEIQYCFWTLIKSCAIDTYMSHLAVLRRAIIXLQLTLENILAFEHFSNNQVDSRGS

SEQ ID NO: 953 - protein, 223 aa, Homo sapiens
  SITE (38): Xaa equals any of the naturally occurring L-amino acids
  SITE (180): Xaa equals any of the naturally occurring L-amino acids
  SITE (220): Xaa equals any of the naturally occurring L-amino acids
RPCPEEAEIGIAMGSGTAVAKTASEMVLADDNFSTIVXAVEEGRAIYNNMKQFIRYLISSNVGEVVCIFLTAALGLPEALIPVQLLWVNLVTDGLPATALGFNPPDLDIMDRPPRSPKEPLISGWLFFRYMAIGGYVGAATVGAAAWWFLYAEDGPHVNYSQLTHFMQCTEDNTHFEGIXCEVFEAPEPMTMALSVLVTIEMCNALNSLSENQSLLRNCXPWG

SEQ ID NO: 954 - protein, 412 aa, Homo sapiens
HELMQEAGDECEPEWCDAEDPLFILYTSGSTGKPKGVVHTVGGYMLYVATTFKYVFDFHAEDVFWCTADIGWITGHSYVTYGPLANGATSVLFEGIPTYPDVNRLWSIVDKYKVTKFYTAPTAIRLLMKFGDEPVTKHSRASLQVLGTVGEPINPEAWLWYHRVVGAQRCPIVDTFWQTETGGHMLTPLPGATPMKPGSATFPFFGVAPAILNESGEELEGEAEGYLVFKQPWPGIMRTVYGNHERFETTYFKKFPGYYVTGDGCQRDQDGYYWITGRIDDMLNVSGHLLSTAEVESALVEHEAVAEAAVVGHPHPVKGECLYCFVTLCDGHTFSPKLTEELKKQIREKIGPIATPDYIQNAPGLPKTRSGKIMRRVLRKIAQNDHDLGDMSTVADPSVISHLFSHRCLTIQ

SEQ ID NO: 955 - protein, 150 aa, Homo sapiens
GLLRAWQLRINAGLRLAARFLPEPLLSLVNHTGQRSDMQKVTLGLLVFLAGFPVLDANDLEDKNSPFYYDWHSLQVGGLICAGVLCAMGIIIVMSEWRSSGEQAGRGWGSPPLTTQLSPTGAKCKCKFGQKSGHHPGETPPLITPGSAQS

SEQ ID NO: 956 - protein, 136 aa, Homo sapiens
  SITE (6): Xaa equals any of the naturally occurring L-amino acids
VDPRVXPRSGGEKPGGLGAPAGIGSRLGCERFSRSREILQAITMSTDTGVSLPSYEEDQGSKLIRKAKEAPFVPVGIAGFAAIVAYGLYKLKSRGNTKMSIHLIHMRVAAQGFVVGAMTVGMGYSMYREFWAKPKP

SEQ ID NO: 957 - protein, 461 aa, Homo sapiens
  SITE (60): Xaa equals any of the naturally occurring L-amino acids
  SITE (103): Xaa equals any of the naturally occurring L-amino acids
  SITE (135): Xaa equals any of the naturally occurring L-amino acids
  SITE (241): Xaa equals any of the naturally occurring L-amino acids
IETSNKNDMTIDILHADGERPNVLENLDNSKEKTVGSEAAKTEDTVLCSSDTDEECLIIXTECKNNSDGKTAVVGSNLSSRPASPNSSSGQASVGNQTNTACXPEESCVLKKPIKRVYKKFDPVGEILKMQDELXKPISRKVPELPLMNLENSKQPSVSEQLSGPSDSSSWPKSGWPSAFQKPKGRLPYELQDYVEDTSEYLAPQEGNFVYKLFSLQDLLLLVRCSVQRIETRPRSKKRKXIRRQFPVYVLPKVEYQACYGVEALTESELCRLWTESLLHSNSSFYVGHIDAFTSKLFLLEEITSEELKEKLSALKISNLFNILQHILKKLSSLQEGSYLLSHAAEDSSLLIYKASDGKVTRTAYNLYKTHCGLPGVPSSLSVPWVPLDPSLLLPYHIHHGRIPCTFPPKSLDTTTQQKIGGTRMPTRSHRNPVSMETKSSCLPAQQVETEGVAPHKRKIT

SEQ ID NO: 958 - protein, 248 aa, Homo sapiens
  SITE (7): Xaa equals any of the naturally occurring L-amino acids
DWGATQXRRSRDRRWGPRNLSLDIGTEVFAPGPGSGIQKQREPRKGRLIVCGHGTLERDGVFCLLSDDHGASWRYGSGVSGIPYGQPKQENDFNPDECQPYELPDGSVVINARNQNNYHCHCRIVLRSYDACDTLRPRDVTFDPELVDPVVAAGAVVTSSGIVFFSNPAHPEFRVNLTLRWSFSNGTSWRKETVQLWPGPSGYSSLATLEGSMDGEEQAPQLYVLYEKGRNHYTESISVAKISVYGTL

SEQ ID NO: 959 - protein, 105 aa, Homo sapiens
IRHEGAGPSQLRLHYPRISMAVRQWVIALALAALLVVDREVPVAAGKLPFSRMPICEHMVESPTCSQMSNLVCGTDGLTYTNECQLCLARIKTKQDIQIMKDGKC

SEQ ID NO: 960 - protein, 237 aa, Homo sapiens
  SITE (68): Xaa equals any of the naturally occurring L-amino acids
  SITE (166): Xaa equals any of the naturally occurring L-amino acids
  SITE (177): Xaa equals any of the naturally occurring L-amino acids
  SITE (187): Xaa equals any of the naturally occurring L-amino acids
  SITE (223): Xaa equals any of the naturally occurring L-amino acids
LGWSLRGGHWHGTHPEASPGCPGGAASSPAGWWTRSVRSWGSSFTSEDCSTTMLGIWTLLPLVLTSVXRLSSKSVNAQVTDINSKGLELRKTVTTVETQNLEGLHHDGQFCHKPCPPGERKARDCTVNGDEPDCVPCQEGKEYTDKAHFSSKCRRCRLCDEGHGLXVEINCTRTQNXKCRCKPNFFXNSTVCEHCDPCTKCEHGIIKECTLTSNTKCKEEGSXSNLGWLWLLLLPIP

SEQ ID NO: 961 - protein, 132 aa, Homo sapiens
QPMSSTWVTNHSEILNTYPLGAGGGNDVQYLKQNLTWTERLYFPLLHESLIILGGLLCIPPFLLSPPLPFVFSKESELRFPCSPATLISKTCLCVRFFTGNMTFCFCIGFTVIQFSSLISSKTKSECTRFFR

SEQ ID NO: 962 - protein, 613 aa, Homo sapiens
AVANMSGWESYYKTEGDEEAEEEQEENLEASGDYKYSGRDSLIFLVDASKAMFESQSEDELTPFDMSIQCIQSVYISKIISSDRDLLAVVFYGTEKDKNSVNFKNIYVLQELDNPGAKRILELDQFKGQQGQKRFQDMMGHGSDYSLSEVLWVCANLFSDVQFKMSHKRIMLFTNEDNPHGNDSAKASRARTKAGDLRDTGIFLDLMHLKKPGGFDISLFYRDIISIAEDEDLRVHFEESSKLEDLLRKVRAKETRKRALSRLKLKLNKDIVISVGIYNLVQKALKPPPIKLYRETNEPVKTKTRTFNTSTGGLLLPSDTKRSQIYGSRQIILEKEETEELKRFDDPGLMLMGFKPLVLLKKHHYLRPSLFVYPEESLVIGSSTLFSALLIKCLEKEVAALCRYTPRRNIPPYFVALVPQEEELDDQKIQVTPPGFQLVFLPFADDKRKMPFTEKIMATPEQVGKMKAIVEKLRFTYRSDSFENPVLQQHFRNLEALALDLMEPEQAVDLTLPKVEAMNKRLGSLVDEFKELVYPPDYNPEGKVTKRKHDNEGSGSKRPKVEYSEEELKTHISKGTLGKFTVPMLKEACRAYGLKSGLKKQELLEALTKHFQD

SEQ ID NO: 963 - protein, 352 aa, Homo sapiens
  SITE (281): Xaa equals any of the naturally occurring L-amino acids
RVQEENARLKKKKEQLQQEIEDWSKLHAELSEQIKSFEKSQKDLEVALTHKDDNINALTNCITQLNLLECESESEGQNKGGNDSDELANGEVGGDRNEKMKNQIKQMMDVSRTQTAISVVEEDLKLLQLKLRASVSTKCNLEDQVKKLEDDRNSLQAAKAGLEDECKTLRQKVEILNELYQQKEMALQKKLSQEEYERQEREHRLSAADEKAVSAAEEVKTYKRRIEEMEDELQKTERSFKNQIATHEKKAHENWLKARAAERAIAEEKREAANLRHKLLXLTQKMAMLQEEPVIVKPMPGKPNTQNPPRRGPLSQNVFWPIPCEWWRMLPSIDSGATRETSLCYSQSKRYA

SEQ ID NO: 964 - protein, 553 aa, Homo sapiens
  SITE (133): Xaa equals any of the naturally occurring L-amino acids
  SITE (375): Xaa equals any of the naturally occurring L-amino acids
  SITE (438): Xaa equals any of the naturally occurring L-amino acids
  SITE (549): Xaa equals any of the naturally occurring L-amino acids
TLEAEKERRKSGLSSRVQFRNQGSEPKYTQELTLKRQKQKVCMEETLWLQDNIRDKLRPIPITASVEIQEPSSRRRVNSLPEVLPILNSDEPKTAHIDVHFLKEGCGDDNVCNSNLKLEYKFCTREGNQDKFXYLPIQKGVPELVLKDQKDIALEITVTNSPSNPRNPTKDGDDAHEAKLIATFPDTLTYSAYRELRAFPEKQLSCVANQNGSQADCELGNPFKRNSNVTFYLVLSTTEVTFDTPDLDINLKLETTSNQDNLAPITAKAKVVIELLLSVSGVAKPSQVYFGGTVVGEQAMKSEDEVGSLIEYEFRVINLGKPLTNLGTATLNIQWPKEISNGKWLLYLVKVESKGLEKVTCEPQKEINSLNLTEXHNSRKKREITEKQIDDNRKFSLFAERKYQTLNCSVNVNCVNIRCPLRGLDSKASLILRSRLWXSTFLEEYSKLNYLDILMRAFIDVTAAAENIRLPNAGTQVRVTVFPSKTVAQYSGVPWWIILVAILAGILMLALLVFILWKCGFFKRNKKDHYDATYHKAEIHAQPSDKERXTSDA

SEQ ID NO: 965 - protein, 220 aa, Homo sapiens
  SITE (70): Xaa equals any of the naturally occurring L-amino acids
  SITE (217): Xaa equals any of the naturally occurring L-amino acids
QYGRIPGSTHASAEPLENPFKKMKNNIVDAANNHSAPEVLYGSLLNQEELKFSRNDLEFKYPAGHGSASXSEHRSWARESKSFNVLKQLLLSENCVRDLSPHRSNSVADSKKKGHKNNVTNSKPEFSISSLNGLMYSSTQPSSCMDNRTFSYPGVVKTPVSPTFPEHLGCAGSRPESGLLNGCSMPSEKGPIKWVITDAEKMSMKSLSRLTKPPHTXLHA

SEQ ID NO: 966 - protein, 385 aa, Homo sapiens
  SITE (221): Xaa equals any of the naturally occurring L-amino acids
WIPRAAGFGTRPLPGAAGGAAGCTQRRSRELAAAAMSHQTGIQASEDVKEIFARARNGKYRLLKISIENEQLVIGSYSQPSDSWDKDYDSFVLPLLEDKQPCYILFRLDSQNAQGYEWIFIAWSPDHSHVRQKMLYAATRATLKKEFGGGHIKDEVFGTVKEDVSLHGYKKYLLSQSSPAPLTAAEEELRQIKINEVQTDVGVDTKHQTLQGVAFPISREXFQALEKLNNRQLNYVQLEIDIKNEIIILANTTNTELKDLPKRIPKDSARYHFFLYKHSHEGDYLESIVFIYSMPGYTCSIRERMLYSSCKSRLLEIVERQLQMDVIRKIEIDNGDELTADFLYEEVHPKQHAHKQSFAKPKGPAGKRGIRRLIRGPAETEATTD

SEQ ID NO: 967 - protein, 221 aa, Homo sapiens
RKKDKSSRPPLTPSLPLSLPPGEEARGGCSAVGAAPPSPGRPGPPPHAAPMHPFYTRAATMIGEIAAAVSFISKFLRTKGLTSERQLQTFSQSLQELLAEHYKHHWFPEKPCKGSGYRCIRINHKMDPLIGQAAQRIGLSSQELFRLLPSELTLWVDPYEVSYRIGEDGSICVLYEASPAGGSTQNSTNVQMVDSRISCKEELLLGRTSPSKNYNMMTVSG

SEQ ID NO: 968 - protein, 212 aa, Homo sapiens
  SITE (1): Xaa equals any of the naturally occurring L-amino acids
  SITE (15): Xaa equals any of the naturally occurring L-amino acids
XLTKGTKAGSSTAVXTALELVDPPGCRNSAEFDLCCSPCRRRLLGREEAGEEPTSPVTQYLQPRSPEECKMFACAKLACTPSLIRAGSRVAYRPISASVLSRPEASRTGEGSTVFNGAQNGVSQLIQREFQTSAISRDIDTAAKFIGAGAATVGVAGSGAGIGTVFGSLIIGYARNPSLKQQLFSYAILGFALSEAMGLFCLMVAFLILFAM

SEQ ID NO: 969 - protein, 224 aa, Homo sapiens
  SITE (140): Xaa equals any of the naturally occurring L-amino acids
  SITE (142): Xaa equals any of the naturally occurring L-amino acids
  SITE (206): Xaa equals any of the naturally occurring L-amino acids
  SITE (224): Xaa equals any of the naturally occurring L-amino acids
YLDAEKMGQKASQQLALKDSKEVPVVCEVVSEAIVHAAQKLKEYLGFEYPPSKLCPAANTLNEIFLIHFITFCQEKGVDEWLTTTKMTKHQAFLFGADWIWTFWGSDKQIKLQLAVQTLQMSSPPPVESKPCDLSNPESXVXESSWKKSRFDKLEEFCNLIGEDCLGLFIIFGMPGKPKDIRGVVLDSVKSQMVRSHLPGGKAVAXFVLETEDCVFIKELLKIX

SEQ ID NO: 970 - protein, 180 aa, Homo sapiens
  SITE (166): Xaa equals any of the naturally occurring L-amino acids
LGLSRVDDAVAANTRQCAQRRDRRGGEGRGQGIEPSPASATPGTRGVCRMPVTRLHEGRFHLRHRHRHGLWLADVHSEEVSIPFAVEPPSGRGCRLCGQLRGDESGVGEMQQPLALPGDRAAPQRQEHRSEKLGELQQGHRGLGAGGVWNTAFMPPDPRPTLPTPXGTPVVSSVRMCGQA

SEQ ID NO: 971 - protein, 130 aa, Homo sapiens
  SITE (85): Xaa equals any of the naturally occurring L-amino acids
  SITE (91): Xaa equals any of the naturally occurring L-amino acids
  SITE (103): Xaa equals any of the naturally occurring L-amino acids
  SITE (106): Xaa equals any of the naturally occurring L-amino acids
  SITE (112): Xaa equals any of the naturally occurring L-amino acids
  SITE (116): Xaa equals any of the naturally occurring L-amino acids
  SITE (118): Xaa equals any of the naturally occurring L-amino acids
  SITE (126): Xaa equals any of the naturally occurring L-amino acids
PRVRPRVLDLLCKNMKHLWFFLLLVAAPRWVLSQVQLQESGPGLVKPSQTLSLTCTVSGGSISSGAYYWSWIRQHPGKGLEWIGXIYYSGXTYYNPSLKSLVXISXDTSKNXFSLXLXSVTAADTXVYYC

SEQ ID NO: 972 - protein, 210 aa, Homo sapiens
  SITE (14): Xaa equals any of the naturally occurring L-amino acids
  SITE (38): Xaa equals any of the naturally occurring L-amino acids
  SITE (52): Xaa equals any of the naturally occurring L-amino acids
  SITE (67): Xaa equals any of the naturally occurring L-amino acids
  SITE (73): Xaa equals any of the naturally occurring L-amino acids
  SITE (110): Xaa equals any of the naturally occurring L-amino acids
AGSSWKCRGCSLPXLPPPPACALLLPWPRTWVFPSPAXGWRWLTRSRYPLTXSRTSTRSSMGMSLVXGPLQGXLPCRRDPRVCPGTPSSQRHLPVGEVVKQADVVLLGYXVPFSLSPDVRRKNLEIYEAVTSPQGPAMTWSMFAVGWMELKDAVRARGLLDRSFANMAEPFKVWTENADGSGAVNFLTGMGGFCRRWSSGARGSGSPERV

SEQ ID NO: 973 - protein, 248 aa, Homo sapiens
SRVRGCSRSRQPQARGGRWARDPTLVVMEAGGFLDSLIYGACVVFTLGMFSAGLSDLRHMRMTRSVDNVQFLPFLTTEVNNLGWLSYGALKGDGILIVVNTVGAALQTLYILAYLHYCPRKRVVLLQTATLLGVLLLGYGYFWLLVPNPEARLQQLGLFCSVFTISMYLSPLADLAKVIQTKSTQCLSYPLTIATLLTSASWCLYGFRLRDPYIMVSNFPGIVTSFIRFWLFWKYPQEQDRNYWLLQT

SEQ ID NO: 974 - protein, 202 aa, Homo sapiens
  SITE (2): Xaa equals any of the naturally occurring L-amino acids
  SITE (10): Xaa equals any of the naturally occurring L-amino acids
  SITE (60): Xaa equals any of the naturally occurring L-amino acids
SXLPFIKGNXSWSFHRGGGRSRTSGSPGLQEFGTRRELVSRRAQRTATDSPGHPPTAHGXQQSRKARPGQRKPSRAGWRLRAAAPTGQRPPHVPAPTPRPSGQHEAPGGRAAPAAAGAVHRACGRVQMQVLPEGPKIRYSDVKKLEMKPKYPHCEEKMVIITTKSVSRYRGQEHCLHPKLQSTKRFIKWYNAWNEKRRVYEE

SEQ ID NO: 975 - protein, 260 aa, Homo sapiens
  SITE (212): Xaa equals any of the naturally occurring L-amino acids
LCLPFPTGETPSLGFTVTLVLLNSLAFLLMAVIYTKLYCNLEKEDLSENSQSSMIKHVAWLIFTNCIFFCPVAFFSFAPLITAISISPEIMKSVTLIFFPLPACLNPVLYVFFNPKFKEDWKLLKRRVTKKSGSVSVSISSQGGCLEQDFYYDCGMYSHLQGNLTVCDCCESFLLTKPVSCKHLIKSHSCPALAVASCQRPEGYWSDCGTQXAHSDYADEEDSFVSDSSDQVQACGRACFYQSRGFPLVRYAYNLPRVKD

SEQ ID NO: 976 - protein, 114 aa, Homo sapiens
  SITE (10): Xaa equals any of the naturally occurring L-amino acids
RSRKQEAACXPQDLPGWGNWRLLGGGTVHAKMAVSTEELEATVQEVLGRLKSHQFFQSTWDTVAFIVFLTFMGTVLLLLLLVVAHCCCCSSPGPRRESPRKERPKGVDNLALEP

SEQ ID NO: 977 - protein, 413 aa, Homo sapiens
  SITE (58): Xaa equals any of the naturally occurring L-amino acids
  SITE (75): Xaa equals any of the naturally occurring L-amino acids
  SITE (125): Xaa equals any of the naturally occurring L-amino acids
TPPTHGPTADQPMRPVRVPERGPVHRGAAGAHLPLPTRLRRPQMREAHHCQLRGQRLXRGTGLRQGPTPGQHLPXGGPDKDNGILLYKGDNDPLALELYQGHVRLVYDSLSSPPTTVYSVETVNXGQFHSVELVTLNQTLNLVVDKGTPKSLGKLQKQPAVGINSPLYLGGIPTSTGLSALRQGTDRPLGGFHGCIHEVRINNELQDFKALPPQSLGVSPGCKSCTVCKHGLCRSVEKDSVVCECRPGWTGPLCDQEARDPCLGHRCHHGKCVATGTSYMCKCAEGYGGDLCDNKNDSANACSAFKCHHGQCHISDQGEPYCLCQPGFSGEHCQQENPCLGQVVREVIRRQKGYASCATASKVPIMECRGGCGPQCCQPTRSKRRKYVFQCTDGSSFVEEVERHLECGCLACS

SEQ ID NO: 978 - protein, 271 aa, Homo sapiens
TQRMSGKHYKGPEVSCCIKYFIFGFNVIFWFLGITFLGIGLWAWNEKGVLSNISSITDLGGFDPVWLFLVVGGVMFILGFAGCIGALRENTFLLKFFSVFLGIIFFLELTAGVLAFVFKDWIKDQLYFFINNNIRAYRDDIDLQNLIDFTQEYWQCCGAFGADDWNLNIYFNCTDSNASRERCGVPFSCCTKDPAEDVINTQCGYDARQKPEVDQQIVIYTKGCVPQFEKWLQDNLTIVAGIFIGIALLQIFGICLAQNLVSDIEAVRASW

SEQ ID NO: 979 - protein, 674 aa, Homo sapiens
PGRTGAAGPAGPAGPRGSPGERGEVGPAGPNGFAGPAGAAGQPGAKGERGAKGPKGENGVVGPTGPVGAAGPAGPNGPPGPAGSRGDGGPPGMTGFPGAAGRTGPPGPSGISGPPGPPGPAGKEGLRGPRGDQGPVGRTGEVGAVGPPGFAGEKGPSGEAGTAGPPGTPGPQGLLGAPGILGLPGSRGERGLPGVAGAVGEPGPLGIAGPPGARGPPGAVGSPGVNGAPGEAGRDGNPGNDGPPGRDGQPGHKGERGYPGNIGPVGAAGAPGPHGPVGPAGKHGNRGETGPSGPVGPAGAVGPRGPSGPQGIRGDKGEPGEKGPRGLPGLKGHNGLQGLPGIAGHHGDQGAPGSVGPAGPRGPAGPSGPAGKDGRTGHPGTVGPAGIRGPQGHQGPAGPPGPPGPPGPPGVSGGGYDFGYDGDFYRADQPRSAPSLRPKDYEVDATLKSLNNQIETLLTPEGSRKNPARTCRDLRLSHPEWSSGYYWIDPNQGCTMDAIKVYCDFSTGETCIRAQPENIPAKNWYRSSKDKKHVWLGETINAGSQFEYNVEGVTSKEMATQLAFMRLLANYASQNITYHCKNSIAYMDEETGNLKKAVILQGSNDVELVAEGNSRFTYTVLVDGCSKKTNEWGKTIIEYKTNKPSRLPFLDIAPLDIGGADQEFFVDIGPVCFK

SEQ ID NO: 980 - protein, 120 aa, Homo sapiens
CPLCSAAGSRRTAGRMTQNTVIVNGVAMASRPSQPTHVNVHIHQESALTQLLKAGGSLKKFLFHPGDTVPSTARIGYEQLALGVTQILLGVVSCVLGVCLSLGPWTVLSASAVPSGRGLW

SEQ ID NO: 981 - protein, 76 aa, Homo sapiens
IPGSYLRIVYKTTCNPFMKNVFKYCFLLLCSALSLVLPLSPECSIIYRLYITTSIAFGGKSRFSCNFPAVKMLPCI

SEQ ID NO: 982 - protein, 208 aa, Homo sapiens
  SITE (1): Xaa equals any of the naturally occurring L-amino acids
  SITE (4): Xaa equals any of the naturally occurring L-amino acids
  SITE (9): Xaa equals any of the naturally occurring L-amino acids
  SITE (180): Xaa equals any of the naturally occurring L-amino acids
  SITE (192): Xaa equals any of the naturally occurring L-amino acids
  SITE (193): Xaa equals any of the naturally occurring L-amino acids
  SITE (194): Xaa equals any of the naturally occurring L-amino acids
  SITE (195): Xaa equals any of the naturally occurring L-amino acids
  SITE (200): Xaa equals any of the naturally occurring L-amino acids
XSFXTQPSXSTTTSPLWANTVTLAGGKLHSKGLKYFHHFTLSLCGNQGRKMSVCTDNVTDLRIPEGESGFSKSITAYVCQAVIIPPEVTGYKAGVSSQPVSLADRLIGVTTDMTLDGITSPAELFHLESLGIPDVIFFYRSNDVTQSCSSGRSTTIRVRCSPQKTVPGSLLLPGTCSDGXCDGCNFHFLWEXXXXARSAXWLTTMLSS

SEQ ID NO: 983 - protein, 261 aa, Homo sapiens
  SITE (91): Xaa equals any of the naturally occurring L-amino acids
  SITE (92): Xaa equals any of the naturally occurring L-amino acids
  SITE (259): Xaa equals any of the naturally occurring L-amino acids
  SITE (260): Xaa equals any of the naturally occurring L-amino acids
VTGGELFEDIVAREYYSEADASHCIQQILEAVLHCHQMGVVHRDLKPENLLLASKSKGAAVKLADFGLAIEVQGDQQAWFGFAGTPGYLSXXVLRKDPYGKPVDMWACGVILYILLVGYPPFWDEDQHRLYQQIKAGAYDFPSPEWDTVTPEAKDLINKMLTINPAKRITASEALKHPWICQRSTVASMMHRQETVDCLKKFNARRKLKGAILTTMLATRNFSAAKSLLKKPDGVKESTESSNTTIEDEFSLDLTRLTXXG

SEQ ID NO: 984 - protein, 283 aa, Homo sapiens
  SITE (103): Xaa equals any of the naturally occurring L-amino acids
  SITE (268): Xaa equals any of the naturally occurring L-amino acids
STHASGRMAAEGWIWRWGWGRRCLGRPGLLGPGPGPTTPLFLLLLLGSVTADITDGNSEHLKREHSLIKPYQGVGSSSMPLWDFQGSTMLTSQYVRLTPDERXKEGSIWNHQPCFLKDWEMHVHFKVHGTGKKNLHGDGIALWYTRDRLVPGPVFGSKDNFHGLAIFLDTYPNDETTERVFPYISVMVNNGSLSYDHSKDGRWTELAGCTADFRNRDHDTFLAVRYSRGRLTVMTDLEDKNEWKNCIDITGVRLPTGYYFGASAGTGXLSDNHDIISMKAVPS

SEQ ID NO: 985 - protein, 144 aa, Homo sapiens
ARGRAEVLGRAVEPPPGRCWSTPPVAPPARSASAAAMGVQVETISPGDGRTFPKRGQTCVVHYTGMLEDGKKFDSSRDRNKPFKFMLGKQEVIRGWEEGVAQMSVGQRAKLTISPDYAYGATGHPGIIPPHATLVFDVELLKLE

SEQ ID NO: 986 - protein, 75 aa, Homo sapiens
IFVCLCVCLSCVILLGASANSLTVVPSLTLPVHHLRRLDPSLTSPFLKPVSFSLLPNWLWLFLQPFHSRAIFAKE

SEQ ID NO: 987 - protein, 332 aa, Homo sapiens
RTRGRTRGRTRGRVAWWLRLSVRPPAGAIMADAASQVLLGSGLTILSQPLMYVKVLIQVGYEPLPPTIGRNIFGRQVCQLPGLFSYAQHIASIDGRRGLFTGLTPRLCSGVLGTVVHGKVLQHYQESDKGEELGPGNVQKEVSSSFDHVIKETTREMIARSAATLITHPFHVITLRSMVQFIGRESKYCGLCDSIITIYREEGILGFFAGLVPRLLGDILSLWLCNSLAYLVNTYALDSGVSTMNEMKSYSQAVTGFFASMLTYPFVLVSNLMAVNNCGLAGGCPPYSPIYTSWIDCWCMLQKEGNMSRGNSLFFRKVPFGKTYCCDLKMLI

SEQ ID NO: 988 - protein, 909 aa, Homo sapiens
  SITE (32): Xaa equals any of the naturally occurring L-amino acids
  SITE (41): Xaa equals any of the naturally occurring L-amino acids
  SITE (47): Xaa equals any of the naturally occurring L-amino acids
  SITE (48): Xaa equals any of the naturally occurring L-amino acids
  SITE (52): Xaa equals any of the naturally occurring L-amino acids
  SITE (58): Xaa equals any of the naturally occurring L-amino acids
  SITE (62): Xaa equals any of the naturally occurring L-amino acids
  SITE (125): Xaa equals any of the naturally occurring L-amino acids
  SITE (632): Xaa equals any of the naturally occurring L-amino acids
  SITE (851): Xaa equals any of the naturally occurring L-amino acids
GKKAEGAQNQGKKAEGAQNQGKKAEGAQNQGXKAEGAQNQXKKAEGXXNQGXKAEGAXNQGXKAEGAQNQGKKAEGAQNQGKKAEGAQNQGKKAEGAQNQGKKAEGAQNQGKKAEGAQNQGKKVXGAQNQGKKAEGAQNQGKKAEGAQNQGKKAEGAQNQGQKGEGAQNQGKKTEGAQGKKAERSPNQGKKGEGAPIQGKKADSVANQGTKVEGITNQGKKAEGSPSEGKKAEGSPNQGKKADAAANQGKKTESASVQGRNTDVAQSPEAPKQEAPAKKKSGSKKKGEPGPPDADGPLYLPYKTLVSTVGSMVFNEGEAQRLIEILSEKAGIIQDTWHKATQKGDPVAILKRQLEEKEKLLATEQEDAAVAKSKLRELNKEMAAEKAKAAAGEAKVKKQLVAREQEITAVQARMQASYREHVKEVQQLQGKIRTLQEQLENGPNTQLARLQQENSILRDALNQATSQVESKQNAELAKLRQELSKVSKELVEKSEAVRQDEQQRKALEAKAAAFEKQVLQLQASHRESEEALQKRLDEVSRELCHTQSSHASLRADAEKAQEQQQQMAELHSKLQSSEAEVRSKCEELSGLHGQLQEARAENSQLTERIRSIEALLEAGQARDAQDVQASQXEADQQQTRLKELESQVSGLEKEAIELREAVEQQKVKNNDLREKNWKAMEALATAEQACKEKLHSLTQAKEESEKQLCLIEAQTMEALLALLPELSVLAQQNYTEWLQDLKEKGPTLLKHPPAPAEPSSDLASKLREAEETQSTLQAECDQYRSILAETEGMLRDLQKSVEEEEQVWRAKVGAAEEELQKSRVTVKHLEEIVEKLKGELESSDQVREHTXHLEAELEKHMAAASAECQNYAKEVAGLRQLLLESQSQLDAAKSEARNRAMSLPWSGSS

SEQ ID NO: 989 - protein, 100 aa, Homo sapiens
WCSRAVPPPSLLPASTSPPRSVPPPSFSLSLKSVSFGSPRASLPRPSWMRPPSPKPACFAVSPGSWKLAGARGWRGHGGVGEGSLPFLVRSIIVNGCTLF

SEQ ID NO: 990 - protein, 214 aa, Homo sapiens [sequence omitted]

SEQ ID NO: 991 - protein, 263 aa, Homo sapiens
GPVGPAGTRRSHALGPRPGARSSFRLRCELRRCMCGNNMSTPLPAIVPAARKATAAVIFLHGLGDTGHGWAEAFAGIRSSHIKYICPHAPVRPVTLNMNVAMPSWFDIIGLSPDSQEDESGIKQAAENIKALIDQEVKNGIPSNRIILGGFSQGGALSLYTALTTQQKLAGVTALSCWLPLRASFPQGPIGGANRDISILQCHGDCDPLVPLMFGSLTVEKLKTLVNPANVTFKTYEGMMHSSCQQEMMDVKQFIDKLLPPID

SEQ ID NO: 992 - protein, 256 aa, Homo sapiens
  SITE (229): Xaa equals any of the naturally occurring L-amino acids
VPRRVLEPLLQRIHEEESAVVCPVIDVIDWNTFEYLGNSGEPQIGGFDWRLVFTWHTVPERERIRMQSPVDVIRSPTMAGGLFAVSKKYFEYLGSYDTGMEVWGGENLEFSFRIWQCGGVLETHPCSHVGHVFPKQAPYSRNKALANSVRAAEVWMDEFKELYYHRNPRARLEPFGDVTERKQLRDKLQCKDFKWFLETVYPELHVPEDRPGFFGMLQNKGLTDYCFDXNPPDENQIVGHQVILYLCHGMGQNDLV

SEQ ID NO: 993 - protein, 70 aa, Homo sapiens
VVWSRVCGFSGPIIMAASESEESHRAVGELLLPSPSPFVAPTLAAYFCSSAGESVWASSSPSLSPCYFMG

SEQ ID NO: 994 - protein, 220 aa, Homo sapiens
  SITE (4): Xaa equals any of the naturally occurring L-amino acids
DYAXTPQGLCYDVACTRKLGPLEGSSRAAAAAFGESAGQMSNERGFENVELGVIGKKKKVPRRVIHFVSGETMEEYSTDEDEVDGLEKKDVLPTVDPTKLTWGPYLWFYMLRAATSTLSVCDFLGEKIASVLGISTPKYQYAIDEYYRMKKEEEEEEEENRMSEEAEKQYQQNKLQTDSIVQTDQPETVISSSFVNVNFEMEGDSEVIMESKQNPVSVPP

SEQ ID NO: 995 - protein, 107 aa, Homo sapiens
  SITE (23): Xaa equals any of the naturally occurring L-amino acids
KIQGPELWKLQAKGMGLGLSCVXILIRKGYAHTLACSDSKTEGFTRPTPGKWASLPPMLSFNLCNLPVSIGGHLTPSKEPSLFCPLPCTVFLCISPSWALFYSHLGL

SEQ ID NO: 996 - protein, 146 aa, Homo sapiens
  SITE (13): Xaa equals any of the naturally occurring L-amino acids
  SITE (14): Xaa equals any of the naturally occurring L-amino acids
  SITE (16): Xaa equals any of the naturally occurring L-amino acids
TIQPRRSPSTRFXXNXSLVQENLYFQRCLDWNRDILKKELGLTEQDIIDLPALFKMDEDHRARAFFPNMVNMIVLDKDLGIPKPFGPQVEEECCLEMHVRGLLEPLGLECTFIDDISAYHKFLGEVHCGTNVRRKPFTFKWWHMVP

SEQ ID NO: 997 - protein, 123 aa, Homo sapiens
LTQKATLLFLVKMAGKQAVSASGKWLDGIRKWYYNAAGFNKLGLMRDDTIYEDEDVKEAIRRLPENLYNDRMFRIKRALDLNLKHQILPKEQWTKYEEENFYLEPYLKEVIRERKEREEWAKK

SEQ ID NO: 998 - protein, 762 aa, Homo sapiens
HGLTRDSSEQGRTGDTLGRPSACMDALKPPCLWRNHERGKKDRDSCGRKNSEPGSPHSLEALRDAAPSQGLNFLLLFTKMLFIFNFLFSPLPTPALICILTFGAAIFLWLITRPQPVLPLLDLNNQSVGIEGGARKGVSQKNNDLTSCCFSDAKTMYEVFQRGLAVSDNGPCLGYRKPNQPYRWLSYKQVSDRAEYLGSCLLHKGYKSSPDQFVGIFAQNRPEWIISELACYTYSMVAVPLYDTLGPEAIVHIVNKADIAMVICDTPQKALVLIGNVEKGFTPSLKVIILMDPFDDDLKQRGEKSGIEILSLYDAENLGKEHFRKPVPPSPEDLSVICFTSGTTGDPKGAMITHQNIVSNAAAFLKCVEHAYEPTPDDVAISYLPLAHMFERIVQAVVYSCGARVGFFQGDIRLLADDMKTLKPTLFPAVPRLLNRIYDKVQNEAKTPLKKFLLKLAVSSKFKELQKGIIRHDSFWDKLIFAKIQDSLGGRVRVIVTGAAPMSTSVMTFFRAAMGCQVYEAYGQTECTGGCTFTLPGDWTSGHVGVPLACNYVKLEDVADMNYFTVNNEGEVCIKGTNVFKGYLKDPEKTQEALDSDGWLHTGDIGRWLPNGTLKIIDRKKNIFKLAQGEYIAPEKIENIYNRSQPVLQIFVHGESLRSSLVGVVVPDTDVLPSFAAKLGVKGSFEELCQNQVVREAILEDLQKIGKESGLKTFEQVKAIFLHPEPFSIENGLLTPTLKAKRGELSKYFRTQIDSLYEHIQD

SEQ ID NO: 999 - protein, 130 aa, Homo sapiens
TNVDKLVKDIYGGDYERFGLQGSAVASSFGNMMSKEKRDSISKEDLARATLVTITNNIGSIARMCALNENIDRVVFVGNFLRINMVSMKLLAYAMDFWSKGQLKALFLEHEGYFGAVGALLELFKMTDDK

SEQ ID NO: 1000 - protein, 270 aa, Homo sapiens
  SITE (61): Xaa equals any of the naturally occurring L-amino acids
  SITE (71): Xaa equals any of the naturally occurring L-amino acids
QQNEAKIKGVSKGRNICVVCCQHKMEELKEGLRQRDELIEEKQRMQQKIDTMTKEVFDLQXTLLWKDKKIXKHGLVIIPDGTPNGDVSHEPVAGAITVVSQEAAQVLESAGEGPLDVRLRKLAGEKEELLSQIRKLKLQLEEERQKCSRNDGTVGDLAGLQNGSDLQFIEMQRDANRQISEYKFKLSKAEQDITTLEQSISRLEGQVLRYKTAAENAEKVEDELKAEKRKLQRELRTALDKIEEMEMTNSHLAKRLEKMKANRTALLAQQ

SEQ ID NO: 1001 - protein, 124 aa, Homo sapiens
  SITE (110): Xaa equals any of the naturally occurring L-amino acids
  SITE (111): Xaa equals any of the naturally occurring L-amino acids
LHSQVFPALTPKRWTQVRRGTATVGGMAILQVTAGHPLAMAQGPAGHPPTMAQGPAGHPPTMVQGPAGHPLAMAQGPAGHPPTMVQGPAGLPLAMAQVTHPLVHITEEVXXNRTQDGKPERNCP

SEQ ID NO: 1002 - protein, 647 aa, Homo sapiens
TIQIVNMGRRSTSSTKSGKFMNPTDQARKEARKRELKKNKKQRMMVRAAVLKMKDPKQIIRDMEKLDEMEFNPVQQPQLNEKVLKDKRKKLRETFERILRLYEKENPDIYKELRKLEVEYEQKRAQLSQYFDAVKNAQHVEVESIPLPDMPHAPSNILIQDIPLPGAQPPSILKKTSAYGPPTRAVSILPLLGHGVPRLPPGRKPPGPPPGPPPPQVVQMYGRKVGFALDLPPRRRDEDMLYSPELAQRGHDDDVSSTSEDDGYPEDMDQDKHDDSTDDSDTDKSDGESDGDEFVHRDNGERDNNEEKKSGLSVRFADMPGKSRKKKKNMKELTPLQAMMLRMAGQEIPEEGREVEEFSEDDDEDDSDDSEAEKQSQKQHKEESHSDGTSTASSQQQAPPQSVPPSQIQAPPMPGPPPLGPPPAPPLRPPGPPTGLPPGPPPGAPPFLRPPGMPGLRGPLPRLLPPGPPPGRPPGPPPGPPPGLPPGPPPRGPPPRLPPPAPPGIPPPRPGMMRPPLVPPLGPAPPGLFPPAPLPNPGVLSAPPNLIQRPKADDTSAATIEKKATATISAKPQITNPKAEITRFVPTALRVRRENKGATAAPQRKSEDDSAVPLAKAAPKSGPSVPVSVQTKDDVYEAFMKEMEGLL

SEQ ID NO: 1003 - protein, 342 aa, Homo sapiens
  SITE (109): Xaa equals any of the naturally occurring L-amino acids
  SITE (251): Xaa equals any of the naturally occurring L-amino acids
  SITE (253): Xaa equals any of the naturally occurring L-amino acids
LWGQGTLVTVSSASTKGPSVFPLAPSSKSTSGGTAALGCLVKDYFPEPVTVSWNSGALTSGVHTFPAVLQSSGLYSLSSVVTVPSSSLGTQTYICNVNHKPSNTKVDKXVEPKSCDKTHTCPPCPAPELLGGPSVFLFPPKPKDTLMISRTPEVTCVVVDVSHEDPEVKFNWYVDGVEVHNAKTKPREEQYNSTYRVVSVLTVLHQDWLNGKEYKCKVSNKALPAPIEKTISKAKGQPREPQVYTLPPSRXEXTKNQVSLTCLVKGFYPSDIAVEWESNGQPENNYKTTPPVLDSDGSFFLYSKLTVDKSRWQQGNVFSCSVMHEALHNHYTQKSLSLSPGK

SEQ ID NO: 1004 - protein, 544 aa, Homo sapiens
  SITE (27): Xaa equals any of the naturally occurring L-amino acids
  SITE (531): Xaa equals any of the naturally occurring L-amino acids
RLPPASATARRPRPSSALCCPRSRRRXGQRPGAAQGCHPRRFPKKASRTARIASDEEIQGTKDAVIQDLERKLRFKEDLLNNGQPRLTYEERMARRLLGADSATVFNIQEPEEETANQEYKVSSCEQRLISEIEYRLERSPVDESGDEVQYGDVPVENGMAPFFEMKLKHYKIFEGMPVTFTCRVAGNPKPKIYWFKDGKQISPKSDHYTIQRDLDGTCSLHTTASTLDDDGNYTIMAANPQGRISCTGRLMVQAVNQRGRSPRSPSGHPHVRRPRSRSRDSGDENEPIQERFFRPHFLQAPGDLTVQEGKLCRMDCKVSGLPTPDLSWQLDGKPVRPDSAHKMLVRENGVHSLIIEPVTSRDAGIYTCIATNRAGQNSFSLELVVAAKEAHKPPVFIEKLQNTGVADGYPVRLECRVLGVPPPQIFWKKENESLTHSTDRVSMHQDNHGYICLLIQGATKEDAGWYTVSAKNEAGIVSCTARLDVYTQWHQQSQSTKPKKVRPSASRYAALSDQGLDIKAAFQPEANPSXLTLNTALVESEDL

SEQ ID NO: 1005 - protein, 194 aa, Homo sapiens
AAPQPTPEERPAGVRRAQELGMSYKPIAPAPSSTPGSSTPGPGTPVPTGSVPSPSGSVPGAGAPFRPLFNDFGPPSMGYVQAMKPPGAQGSQSTYTDLLSVIEEMGKEIRPTYAGSKSAMERLKRGSASASASGPIRPLQSTRFSLAFIPSCTNHPGLPVLCPLVGPLQEPRSGPPGGSTKDTPPQQELAARSP

SEQ ID NO: 1006 - protein, 312 aa, Homo sapiens
  SITE (105): Xaa equals any of the naturally occurring L-amino acids
  SITE (220): Xaa equals any of the naturally occurring L-amino acids
  SITE (222): Xaa equals any of the naturally occurring L-amino acids
  SITE (231): Xaa equals any of the naturally occurring L-amino acids
  SITE (244): Xaa equals any of the naturally occurring L-amino acids
  SITE (298): Xaa equals any of the naturally occurring L-amino acids
  SITE (299): Xaa equals any of the naturally occurring L-amino acids
  SITE (309): Xaa equals any of the naturally occurring L-amino acids
AVRLPAAYIKAPGHAEPSSRTRPTTMRSCLWRCRHLSQGVQWSLLLAVLVFFLFALPSFIKEPQTKPSRHQRTENIKERSLQSLAKPKSQAPTRARRTTIYAEPXPENNALNTQTQPKAHTTGDRGKEANQAPPEEQDKVPHTAQRAAWKSPEKEKTMVNTLSPRGQDAGMASGRTEAQSWKSQDTKTTQGNGGQTRKLTASRTVSEKHQGKAATTAKTXIXKSQHRMLAXTGAVSTRTRQKGXTTAVIPPKEKKPQATPPPAPFQSPTTQRNQRLKGGNFKSEPRWDFEEKYKLRNXXASDDLALTLXRSK

SEQ ID NO: 1007 - protein, 365 aa, Homo sapiens
PEPAMALPHRRLSPWLRQRHQGPGQVCGPQAAEHDRRDAGCTADLLVGRAMTFHGHGFLRLALSNVAPLTGNVYSGFGFHSAQDSALLYYRASPDGLCQVSLQQGRVSLQLLRTEVKTQAGFADGAPHYVAFYSNATGVWLYVDDQLQQMKPHRGPPPELQPQPEGPPRLLLGGLPESGTIYNFSGCISNVFVQRLLGPQRVFDLQQNLGSVNVSTGCAPALQAQTPGLGPRGLQATARKASRRSRQPARHPACMLPPHLRTTRDSYQFGGSLSSHLEFVGILARHRNWPSLSMHVLPRSSRGLLLFTARLRPGSPSLALFLSNGHFVAQMEGLGTRLRAQSRQRSRPGAGTRSPCAGRRTGSCW

SEQ ID NO: 1008 - protein, 196 aa, Homo sapiens
ATPPPPEQAMVAATVAAAWLLLWAAACAQQEQDFYDFKAVNIRGKLVSLEKYRGSVSLVVNVASECGFTDQHYRALQQLQRDLGPHHFNVLAFPCNQFGQQEPDSNKEIESFARRTYSVSFPMFSKIAVTGTGAHPAFKYLAQTSGKEPTWNFWKYLVAPDGKVVGAWDPTVSVEEVRPQITALVRKLILLKREDL

SEQ ID NO: 1009 - protein, 227 aa, Homo sapiens
  SITE (156): Xaa equals any of the naturally occurring L-amino acids
  SITE (196): Xaa equals any of the naturally occurring L-amino acids
  SITE (204): Xaa equals any of the naturally occurring L-amino acids
  SITE (210): Xaa equals any of the naturally occurring L-amino acids
  SITE (212): Xaa equals any of the naturally occurring L-amino acids
  SITE (215): Xaa equals any of the naturally occurring L-amino acids
  SITE (220): Xaa equals any of the naturally occurring L-amino acids
  SITE (222): Xaa equals any of the naturally occurring L-amino acids
DPRVRAAAAGPMADTQYILPNDIGVSSLDCREAFRLLSPTERLYAYHLSRAAWYGGLAVLLQTSPEAPYIYALLSRLFRAQDPDQLRQHALAEGLTEEEYQAFLVYAAGVYSNMGNYKSFGDTKFVPNLPKEKLERVILGSEAAQQHPEEVRGLWXTCGELMFSLEPRLRHLGLGKEGITTYFSGNCTMEDAKLAXISGLTEPXCLQQPXLXRSXWEKGXPXTKVRV

SEQ ID NO: 1010 - protein, 344 aa, Homo sapiens
  SITE (31): Xaa equals any of the naturally occurring L-amino acids
DPASNMWQLWASLCCLLVLANARSRPSFHPXSDELVNYVNKRNTTWQAGHNFYNVDMSYLKRLCGTFLGGPKPPQRVMFTEDLKLPASFDAREQWPQCPTIKEIRDQGSCGSCWAFGAVEAISDRICIHTNAHVSVEVSAEDLLTCCGSMCGDGCNGGYPAEAWNFWTRKGLVSGGLYESHVGCRPYSIPPCEHHVNGSRPPCTGEGDTPKCSKICEPGYSPTYKQDKHYGYNSYSVSNSEKDIMAEIYKNGPVEGAFSVYSDFLLYKSGVYQHVTGEMMGGHAIRILGWGVENGTPYWLVANSWNTDWGDNGFFKILRGQDHCGIESEVVAGIPRTDQYWEKI

SEQ ID NO: 1011 - protein, 384 aa, Homo sapiens
AGTRGPGAHIRPWHPDVATMLNILALVYRDQNKYKEAAHLLNDALSIRESTLGPDHPAVAATLNNLAVLYGKRGKYKEAEPLCQRALEIREKVLGTNHPDVAKQLNNLALLCQNQGKYEAVERYYQRALAIYEGQLGPDNPNVARTKNNLASCYLKQGKYAEAETLYKEILTRAHVQEFGSVDDDHKPIWMHAEEREEMSKSRHHEGGTPYAEYGGWYKACKVSSPTVNTTLRNLGALYRRQGKLEAAETLEECALRSRRQGTDPISQTKVAELLGESDGRRTSQEGPGDSVKFEGGEDASVAVEWSGDGSGTLQRSGSLGKIRDVLRRSSELLVRKLQGTEPRPSSSNMKRAASLNYLNQPSAAPLQVSRGLSASTMDLSSSS

SEQ ID NO: 1012 - protein, 130 aa, Homo sapiens [sequence omitted]

SEQ ID NO: 1013 - protein, 25 aa, Homo sapiens
KILWPGVVAHACNPSTLGGRGGRIA

SEQ ID NO: 1014 - protein, 233 aa, Homo sapiens
  SITE (44): Xaa equals any of the naturally occurring L-amino acids
  SITE (56): Xaa equals any of the naturally occurring L-amino acids
  SITE (71): Xaa equals any of the naturally occurring L-amino acids
NCNLNPAIHFGFFLSDTMCGKLFCQGGSDNLPWKGRIVTFLTCXTFDPEDTSQEIXMVANGTKCGDNKVCXNAECVDIEKAYKSTNCSSKCKGHAVCDHELQCQCEEGWIPPDCDDSSVVFHFSIVVGVLFPMAVIFVVVAMVIRHQSSREKQKKDQRPLSTTGTRPHKQKRKPQMVKAVQPQEMSQMKPHVYDLPVEGNEPPASFHKDTNALPPTVFKDNPMSTPKDSNPKA

SEQ ID NO: 1015 - protein, 573 aa, Homo sapiens
  SITE (14): Xaa equals any of the naturally occurring L-amino acids
  SITE (28): Xaa equals any of the naturally occurring L-amino acids
  SITE (179): Xaa equals any of the naturally occurring L-amino acids
HEYKVAALGLATGXVLVLLLLCLYRVLXPRNYGQLGGGPGRRRRGELPCDDYGYAPPETEIVPLVLRGHLMDIECLASDGMLLVSCCLAGHICVWDAQTGDCLTRIPRPGRQRRDSGVGSGLEAQESWERLSDGGKAGPEEPGDSPPLRHRPRGPPPPSLFGDQPDLTCLIDTNFSAQXRSSQPTQPEPRHRAVCGRSRDSPGYDFSCLVQRVYQEEGLAAVCTPALRPPSPGPVLSQAPEDEGGSPEKGSPSLAWAPSAEGSIWSLELQGNLIVVGRSSGRLEVWDAIEGVLCCSSEEVSSGITALVFLDKRIVAARLNGSLDFFSLETHTALSPLQFRGTPGRGSSPASPVYSSSDTVACHLTHTVPCAHQKPITALKAAAGRLVTGSQDHTLRVFRLEDSCCLFTLQGHSGAITTVYIDQTMVLASGGQDGAICLWDVLTGSRVSHVFAHRGDVTSLTCTTSCVISSGLDDLISIWDRSTGIKFYSIQQDLGCGASLGVISDNLLVTGGQGCVSFWDLNYGDLLQTVYLGKNSEAQPARQILVLDNAAIVCNFGSELSLVYVPSVLEKLD

SEQ ID NO: 1016 - protein, 45 aa, Homo sapiens
KFYSYSVYVAQPGLEPFGSSDPPALASQSAGITDGSHRVWPIPAS

SEQ ID NO: 1017 - protein, 105 aa, Homo sapiens
GKVHGLIPQVKNVFTLLIAVSLYLYIRYISYEHKFVVKVSSVWAMAHTCNSNTLGGSGGRISSPQEFETSLGNKLDPMSLKNVKNIKRLSQEDHLSLGVQGCSKL

SEQ ID NO: 1018 - protein, 30 aa, Homo sapiens
NPVSTKNTKISWVWWWAPVVPATREAEAGV

SEQ ID NO: 1019 - protein, 72 aa, Homo sapiens
  SITE (11): Xaa equals any of the naturally occurring L-amino acids
  SITE (22): Xaa equals any of the naturally occurring L-amino acids
  SITE (43): Xaa equals any of the naturally occurring L-amino acids
PGWSRSPDLVXRAPRPPKVLGXTGVSHRARPDSLKIEEVLPRXSDLTQMHRPCSWYLFSLCWGAVVPSFLGG

SEQ ID NO: 1020 - protein, 57 aa, Homo sapiens
  SITE (17): Xaa equals any of the naturally occurring L-amino acids
SQLLGEAEAGESLEPGXGDCSEPRSHHCTPVWPTEQDSISKKKRKGDSDLVLLNTSF

SEQ ID NO: 1021 - protein, 18 aa, Homo sapiens [sequence omitted]

SEQ ID NO: 1022 - protein, 91 aa, Homo sapiens
  SITE (39): Xaa equals any of the naturally occurring L-amino acids
SGNHVQNPSSGTACCLQPLSPGLRVVYGHTWRFFVVVFXTEFHSCCPGWSAMAPSRLTATSTSWFKRSQASASQVVGITGACHHTWLILYF

SEQ ID NO: 1023 - protein, 28 aa, Homo sapiens
AEIAPLHSSLGNKSETLSQKKNKKPHKN

SEQ ID NO: 1024 - protein, 60 aa, Homo sapiens
  SITE (8): Xaa equals any of the naturally occurring L-amino acids
  SITE (10): Xaa equals any of the naturally occurring L-amino acids
  SITE (13): Xaa equals any of the naturally occurring L-amino acids
  SITE (26): Xaa equals any of the naturally occurring L-amino acids
  SITE (38): Xaa equals any of the naturally occurring L-amino acids
KVNIGEGXRXRSXVPVRNSRVDPRVXLLVQAGLELATXGDPPASASQSGGITGVSHRAQP

SEQ ID NO: 1025 - protein, 67 aa, Homo sapiens
  SITE (17): Xaa equals any of the naturally occurring L-amino acids
  SITE (26): Xaa equals any of the naturally occurring L-amino acids
  SITE (47): Xaa equals any of the naturally occurring L-amino acids
  SITE (65): Xaa equals any of the naturally occurring L-amino acids
ANLCIFSGNGVLPRWPXWSRTPDLRXSTHPSLPKCWDYRREPLSPAXFSVFNIIFVLSTTFQVLXVQ

SEQ ID NO: 1026 - protein, 71 aa, Homo sapiens
  SITE (3): Xaa equals any of the naturally occurring L-amino acids
EKXLKEEGKAGWGGWGKEAGSADHSPSMSCFLKMLELGQAWWLTPVIPALWEAEAGRSLEVRSSRPAWPTW

SEQ ID NO: 1027 - protein, 72 aa, Homo sapiens
  SITE (41): Xaa equals any of the naturally occurring L-amino acids
  SITE (69): Xaa equals any of the naturally occurring L-amino acids
  SITE (72): Xaa equals any of the naturally occurring L-amino acids
NPVSTKNTKISRAWWQAPVIPATREAEAGKSLEPGSRKLQXAKVMSSLHSSLGNKSEDFVSKKKLTDFXFLX

SEQ ID NO: 1028 - protein, 27 aa, Homo sapiens
  SITE (16): Xaa equals any of the naturally occurring L-amino acids
  SITE (18): Xaa equals any of the naturally occurring L-amino acids
  SITE (23): Xaa equals any of the naturally occurring L-amino acids
SQLLGRLRQENCLSPXGXGCSEXRSGH

SEQ ID NO: 1029 - protein, 121 aa, Homo sapiens
  SITE (9): Xaa equals any of the naturally occurring L-amino acids
  SITE (108): Xaa equals any of the naturally occurring L-amino acids
DMNSLMMGXDKIKFKHITPLQEQSKEVAIRIFQGCQFRSVEAVQEITEYAKSIPGFVNLDLNDQVTLLKYGVHEIIYTMLASLMNKDGVLISEGPSFMTREFLKSLRXLLVTLWEPSLSLP

SEQ ID NO: 1030 - protein, 34 aa, Homo sapiens
  SITE (34): Xaa equals any of the naturally occurring L-amino acids
AEETPHPWQKFRTKPQGDQDTGKEADDGCALGGX

SEQ ID NO: 1031 - protein, 117 aa, Homo sapiens
  SITE (107): Xaa equals any of the naturally occurring L-amino acids
  SITE (108): Xaa equals any of the naturally occurring L-amino acids
  SITE (117): Xaa equals any of the naturally occurring L-amino acids
SESGPRCSSPVDTECSHAEGSRSQGPEKAFSPASPCAWNVCVTRKAPLLASDSSSSGGSHSEDGDQKAASAMDAVSRGPGREAPRCPQWPRQKKLLARFGFLTTGFXXLPCPRAKRX

SEQ ID NO: 1032 - protein, 46 aa, Homo sapiens
KLTDEEVDEMIREADIDGDGQVNYEEFVQNDDCKMKTYFQLLFPPS

SEQ ID NO: 1033 - protein, 118 aa, Homo sapiens
TVCILRKLFSHNMTRLRKFMVYFGKNQSLQKIQKTPLFVAAICAHWFQYPFDPSFDDVAVFKSYMERLSLRNKATLKILKATVSSCGELALKGFFSCCFEFNGWMDLAEAGGGWKMKI

SEQ ID NO: 1034 - protein, 70 aa, Homo sapiens
  SITE (5): Xaa equals any of the naturally occurring L-amino acids
  SITE (15): Xaa equals any of the naturally occurring L-amino acids
  SITE (16): Xaa equals any of the naturally occurring L-amino acids
  SITE (20): Xaa equals any of the naturally occurring L-amino acids
  SITE (24): Xaa equals any of the naturally occurring L-amino acids
  SITE (25): Xaa equals any of the naturally occurring L-amino acids
  SITE (30): Xaa equals any of the naturally occurring L-amino acids
  SITE (33): Xaa equals any of the naturally occurring L-amino acids
  SITE (42): Xaa equals any of the naturally occurring L-amino acids
  SITE (49): Xaa equals any of the naturally occurring L-amino acids
  SITE (50): Xaa equals any of the naturally occurring L-amino acids
  SITE (56): Xaa equals any of the naturally occurring L-amino acids
  SITE (59): Xaa equals any of the naturally occurring L-amino acids
  SITE (60): Xaa equals any of the naturally occurring L-amino acids
  SITE (62): Xaa equals any of the naturally occurring L-amino acids
  SITE (65): Xaa equals any of the naturally occurring L-amino acids
VKSGXYVVIEVKVAXXYGIXITCXXYLMTXYQXAPPSPQYRXIICMGAXXNGLPLXYQXXLXALXPNDYT

SEQ ID NO: 1035 - protein, 163 aa, Homo sapiens
  SITE (1): Xaa equals any of the naturally occurring L-amino acids
  SITE (147): Xaa equals any of the naturally occurring L-amino acids
  SITE (155): Xaa equals any of the naturally occurring L-amino acids
  SITE (159): Xaa equals any of the naturally occurring L-amino acids
  SITE (161): Xaa equals any of the naturally occurring L-amino acids
  SITE (162): Xaa equals any of the naturally occurring L-amino acids
XDAWVRDEEWGGHSPRSPRGWDQEPAREQAGGGWRARRPRARSVDALDDLTPPSTAESGSRSPTSNGGRRSRAYMPPRSRSRDDLYDQDDSRDFPRSRDPHYDDFRSRERPPADPRSHHHRTRDPRDNGSRSGDLPYDGRLLEEAVXKKGSDERXRPHXEXXE

SEQ ID NO: 1036 - protein, 30 aa, Homo sapiens
  SITE (7): Xaa equals any of the naturally occurring L-amino acids
  SITE (17): Xaa equals any of the naturally occurring L-amino acids
  SITE (25): Xaa equals any of the naturally occurring L-amino acids
GCPPRAXSLPGSPRCRXRCHTMAFXTRQFM

SEQ ID NO: 1037 - protein, 65 aa, Homo sapiens
  SITE (5): Xaa equals any of the naturally occurring L-amino acids
  SITE (26): Xaa equals any of the naturally occurring L-amino acids
  SITE (29): Xaa equals any of the naturally occurring L-amino acids
  SITE (49): Xaa equals any of the naturally occurring L-amino acids
  SITE (55): Xaa equals any of the naturally occurring L-amino acids
  SITE (57): Xaa equals any of the naturally occurring L-amino acids
  SITE (60): Xaa equals any of the naturally occurring L-amino acids
  SITE (65): Xaa equals any of the naturally occurring L-amino acids
THFFXQHQKLVPLLMSIMPRIQKAYXVFXYLVQDLKCLVFSLIGLHFKXKPSRLXIXVGXGGGWX

SEQ ID NO: 1038 - protein, 90 aa, Homo sapiens
CPRVRPRVRPRVRPRVRTPIPVPAYFRHAEPGFSLKRPRGLSRSLPPPPPAKGSIPISRLFPPRTPGWHQLQPRGCHSGRRPRDSAEPWV

SEQ ID NO: 1039 - protein, 104 aa, Homo sapiens
  SITE (7): Xaa equals any of the naturally occurring L-amino acids
  SITE (12): Xaa equals any of the naturally occurring L-amino acids
  SITE (14): Xaa equals any of the naturally occurring L-amino acids
  SITE (31): Xaa equals any of the naturally occurring L-amino acids
  SITE (33): Xaa equals any of the naturally occurring L-amino acids
  SITE (39): Xaa equals any of the naturally occurring L-amino acids
  SITE (51): Xaa equals any of the naturally occurring L-amino acids
  SITE (60): Xaa equals any of the naturally occurring L-amino acids
  SITE (70): Xaa equals any of the naturally occurring L-amino acids
  SITE (78): Xaa equals any of the naturally occurring L-amino acids
  SITE (86): Xaa equals any of the naturally occurring L-amino acids
  SITE (91): Xaa equals any of the naturally occurring L-amino acids
  SITE (94): Xaa equals any of the naturally occurring L-amino acids
  SITE (98): Xaa equals any of the naturally occurring L-amino acids
AAAGPGXCWAFXPXRLHAPTARSTYSFQARXLXEKEFSXLISLGTDRLLDXDMRQVFQFXPHPGGRCSGXKDLRGVTXRLTEMLPXNFRSXAAXFLGXSGAPFS

SEQ ID NO: 1040 - protein, 109 aa, Homo sapiens
GRWLKDQELSPREPVLPPQKMGPMEKFWNKFLENKSPWRKMVHGVYKKSIFVFTHVLVPVWIIHYYMKYHVSEKPYGIVEKKSRIFPGDTILETGEVIPPMKEFPDQHH

SEQ ID NO: 1041 - protein, 197 aa, Homo sapiens
  SITE (3): Xaa equals any of the naturally occurring L-amino acids
ASXHQPSLKGTKAGAPPRCGRSRTSGSPGLQEFGTRSVSGADGGSAACSWKFRLGCLLGAMESDFYLRYYVGHKGKFGHEFLEFEFRPDGKLRYANNSNYKNDVMIRKEAYVHKSVMEELKRIIDDSEITKEDDALWPPPDRVGRQELEIVIGDEHISFTTSKIGSLIDVNQSKDPEGLRVFYYLVQDLKCLVFSLI

SEQ ID NO: 1042 - protein, 110 aa, Homo sapiens
  SITE (7): Xaa equals any of the naturally occurring L-amino acids
  SITE (80): Xaa equals any of the naturally occurring L-amino acids
  SITE (92): Xaa equals any of the naturally occurring L-amino acids
  SITE (99): Xaa equals any of the naturally occurring L-amino acids
  SITE (107): Xaa equals any of the naturally occurring L-amino acids
AGFGSQXLFVDCCDRHLTMQIFVKTLTGKTITLEVEPSDTIENVKAKIQDKEGIPPDQQRLIFAGKQLEDGRTLSDYNIXKESTLHLVLRLXGGMQIFXKTLTGKTXTLE

SEQ ID NO: 1043 - protein, 109 aa, Homo sapiens
LHQPAKMAMQAAKRANIRLPPEVNRILYIRNLPYKITAEEMYDIFGKYGPIRQIRVGNTPETRGTAYVVYEDIFDAKNACDHLSGFNVCNRYLVVLYYNANRAFQKMDT

SEQ ID NO: 1044 - protein, 16 aa, Homo sapiens [sequence omitted]

SEQ ID NO: 1045 - protein, 100 aa, Homo sapiens
  SITE (3): Xaa equals any of the naturally occurring L-amino acids
  SITE (12): Xaa equals any of the naturally occurring L-amino acids
  SITE (16): Xaa equals any of the naturally occurring L-amino acids
  SITE (19): Xaa equals any of the naturally occurring L-amino acids
  SITE (23): Xaa equals any of the naturally occurring L-amino acids
  SITE (38): Xaa equals any of the naturally occurring L-amino acids
  SITE (43): Xaa equals any of the naturally occurring L-amino acids
  SITE (48): Xaa equals any of the naturally occurring L-amino acids
  SITE (49): Xaa equals any of the naturally occurring L-amino acids
  SITE (53): Xaa equals any of the naturally occurring L-amino acids
  SITE (75): Xaa equals any of the naturally occurring L-amino acids
  SITE (78): Xaa equals any of the naturally occurring L-amino acids
  SITE (89): Xaa equals any of the naturally occurring L-amino acids
  SITE (91): Xaa equals any of the naturally occurring L-amino acids
  SITE (99): Xaa equals any of the naturally occurring L-amino acids
SSXPTPPSSCLXPPGXRPXDSTXVPANSMRLKYQHTGXVLDCXFYGPXXAWSXGLDHQLKMHDLTLIKKISWTHXALXDVLNTVRSELXWXWKLGLASXP

SEQ ID NO: 1046 - protein, 114 aa, Homo sapiens
  SITE (62): Xaa equals any of the naturally occurring L-amino acids
  SITE (63): Xaa equals any of the naturally occurring L-amino acids
  SITE (110): Xaa equals any of the naturally occurring L-amino acids
FISVSEKSKDRGSNTIGARLNRVEDKVTQLDQRLALITDMLHQLLSLHGGSTPEPTVRGAPXXNPSPSPSSQPNTQKGTATFPCQLLSRREVTVPTQDRGSFWALHRIEXNNLW

SEQ ID NO: 1047 - protein, 92 aa, Homo sapiens
  SITE (32): Xaa equals any of the naturally occurring L-amino acids
  SITE (85): Xaa equals any of the naturally occurring L-amino acids
  SITE (88): Xaa equals any of the naturally occurring L-amino acids
  SITE (89): Xaa equals any of the naturally occurring L-amino acids
  SITE (90): Xaa equals any of the naturally occurring L-amino acids
DRFSGSKSASTASLTISGLQAEDEADYYCSSXTSSISYVFGTGTKVTVLVQPKANPTVHSCFPPSSLRTSKPNKGNYVFWNHYFXPGXXXKC

SEQ ID NO: 1048 - protein, 91 aa, Homo sapiens
  SITE (7): Xaa equals any of the naturally occurring L-amino acids
  SITE (10): Xaa equals any of the naturally occurring L-amino acids
  SITE (20): Xaa equals any of the naturally occurring L-amino acids
  SITE (31): Xaa equals any of the naturally occurring L-amino acids
  SITE (32): Xaa equals any of the naturally occurring L-amino acids
  SITE (39): Xaa equals any of the naturally occurring L-amino acids
  SITE (40): Xaa equals any of the naturally occurring L-amino acids
  SITE (50): Xaa equals any of the naturally occurring L-amino acids
  SITE (54): Xaa equals any of the naturally occurring L-amino acids
  SITE (61): Xaa equals any of the naturally occurring L-amino acids
  SITE (64): Xaa equals any of the naturally occurring L-amino acids
  SITE (77): Xaa equals any of the naturally occurring L-amino acids
  SITE (82): Xaa equals any of the naturally occurring L-amino acids
  SITE (91): Xaa equals any of the naturally occurring L-amino acids
RGRGKRXPDXKPPALPRPIXNLEVEFTKIFXXNGMGRIXXWEKVCYMLPXNSGXKYVKWKXEIXPTWDEGCGSCTGXLPKRXPPWAPGGMX

SEQ ID NO: 1049 - protein, 149 aa, Homo sapiens
PGQSPELQTMSVSFLIFLPVLGLPWGVLSQVQLQQSGPGLVKPSQTLSLTCAISGDTVSRNSAGWNWIRQSPSRGLEWLGRTYYRSKWYNDYAVSVKSRITINADSTKNQFSLQLNSVTPEDTALYYCARDRGSWSDEAEGLPPRYFYY

SEQ ID NO: 1050 - protein, 146 aa, Homo sapiens
  SITE (123): Xaa equals any of the naturally occurring L-amino acids
AQLLTMDWTWRILFLVAAATSAHSQVQLVQSGAEVKKPGASVKVSCKASGYTFTSYDINWVRQATGQGLEWVGWMNPNSANTGYAQKFQGRVTMTRNTSISTAYMELSSLRSEDTAVYYCARXRRWELLGMMWDFDYWGQGTLVTV

SEQ ID NO: 1051 - protein, 55 aa, Homo sapiens
GRGISGLLFLSSTIMGSTAILALLLAVLQGVCGEVQLVHAGGEMRKARGVSEDLL

SEQ ID NO: 1052 - protein, 144 aa, Homo sapiens
  SITE (40): Xaa equals any of the naturally occurring L-amino acids
  SITE (50): Xaa equals any of the naturally occurring L-amino acids
  SITE (70): Xaa equals any of the naturally occurring L-amino acids
  SITE (108): Xaa equals any of the naturally occurring L-amino acids
  SITE (120): Xaa equals any of the naturally occurring L-amino acids
  SITE (124): Xaa equals any of the naturally occurring L-amino acids
  SITE (128): Xaa equals any of the naturally occurring L-amino acids
  SITE (134): Xaa equals any of the naturally occurring L-amino acids
TMAWTPLLFLTLLLHCTGSLSQLVLTQSPSASASLGASVXLTCTLSSGHXDYAIAWHQQQPEKGPRYLLXLNTDGSHRKGDGIPDRFSGSSSGAERYLTISSLQSEDXADYYCQNWGFGXVFGXRDQXERPKSXQGCPLGQSVP

SEQ ID NO: 1053 - protein, 52 aa, Homo sapiens
  SITE (26): Xaa equals any of the naturally occurring L-amino acids
GTSSPSLAEDPFQGGQVCAPSRAIQXICLPSMYNDPQFGTSCEITGLWKKEF

SEQ ID NO: 1054 - protein, 67 aa, Homo sapiens
QVGAAAVAMTRGNQRELARQKNMKKQSDSVKGKRRDDGLSAAARKQRDSEIMQQKQKKANEKKEEPK

SEQ ID NO: 1055 - protein, 121 aa, Homo sapiens
  SITE (4): Xaa equals any of the naturally occurring L-amino acids
EAEXKMSSYAFFVQTCREEHKKKHPDASVNFSEFSKKCSERWKTMSAKEKGKFEDMAKADKARYEREMKTYIPPKGETKKKFKDPNAPKRPPSAFFLFCSEYRPKIKGEHPGLSIGDVAKK

SEQ ID NO: 1056 - protein, 57 aa, Homo sapiens
  SITE (1): Xaa equals any of the naturally occurring L-amino acids
  SITE (3): Xaa equals any of the naturally occurring L-amino acids
  SITE (13): Xaa equals any of the naturally occurring L-amino acids
XCXIKTNKNVKRXKSQRATKRISHMPSRPELSAVATREERTMWIPCGYADTYLTELL

SEQ ID NO: 1057 - protein, 118 aa, Homo sapiens
KLRQAFQGDSIPVFDLLILGVGPDGHTCSLFPDHPLLQEREKIVAPISDSPKPPPQRVTLTLPVLNAARTVIFVATGEGKAAVLKRILEDQEENPLPAAWSSPTPGNCAGLGRGGRRF

SEQ ID NO: 1058 - protein, 104 aa, Homo sapiens
  SITE (2): Xaa equals any of the naturally occurring L-amino acids
  SITE (3): Xaa equals any of the naturally occurring L-amino acids
  SITE (8): Xaa equals any of the naturally occurring L-amino acids
  SITE (22): Xaa equals any of the naturally occurring L-amino acids
  SITE (62): Xaa equals any of the naturally occurring L-amino acids
  SITE (78): Xaa equals any of the naturally occurring L-amino acids
  SITE (91): Xaa equals any of the naturally occurring L-amino acids
  SITE (99): Xaa equals any of the naturally occurring L-amino acids
  SITE (100): Xaa equals any of the naturally occurring L-amino acids
VXXEPHGXTLVFARHGRERLGXGDGAAQEGPYGRPATSKQAILAAQRLGEDVETSNKWAAGXNKQHSITKNTAKLDRXTECCTMTGDPEVXQVIQQVGXXRAYT

SEQ ID NO: 1059 - protein, 48 aa, Homo sapiens
REQKLELHRGAAALELVDPPGCRNSARVLPLRESNCIPASVSFLCVIS

SEQ ID NO: 1060 - protein, 100 aa, Homo sapiens
  SITE (74): Xaa equals any of the naturally occurring L-amino acids
  SITE (75): Xaa equals any of the naturally occurring L-amino acids
  SITE (79): Xaa equals any of the naturally occurring L-amino acids
  SITE (99): Xaa equals any of the naturally occurring L-amino acids
RNVTHIDQALQEAHRVLKPGGRFLCLEFSQVNNPLISRLYDLYSFQVIPVLGEVIAGDWKSYQYLVESIRRFPXXEEFXDMIEDAGFHKVTYESLTSGXV

SEQ ID NO: 1061 - protein, 137 aa, Homo sapiens
  SITE (19): Xaa equals any of the naturally occurring L-amino acids
  SITE (21): Xaa equals any of the naturally occurring L-amino acids
  SITE (30): Xaa equals any of the naturally occurring L-amino acids
  SITE (32): Xaa equals any of the naturally occurring L-amino acids
  SITE (33): Xaa equals any of the naturally occurring L-amino acids
  SITE (35): Xaa equals any of the naturally occurring L-amino acids
  SITE (49): Xaa equals any of the naturally occurring L-amino acids
  SITE (51): Xaa equals any of the naturally occurring L-amino acids
  SITE (52): Xaa equals any of the naturally occurring L-amino acids
  SITE (56): Xaa equals any of the naturally occurring L-amino acids
  SITE (67): Xaa equals any of the naturally occurring L-amino acids
  SITE (68): Xaa equals any of the naturally occurring L-amino acids
  SITE (69): Xaa equals any of the naturally occurring L-amino acids
  SITE (70): Xaa equals any of the naturally occurring L-amino acids
  SITE (72): Xaa equals any of the naturally occurring L-amino acids
  SITE (84): Xaa equals any of the naturally occurring L-amino acids
  SITE (97): Xaa equals any of the naturally occurring L-amino acids
  SITE (99): Xaa equals any of the naturally occurring L-amino acids
  SITE (105): Xaa equals any of the naturally occurring L-amino acids
  SITE (106): Xaa equals any of the naturally occurring L-amino acids
  SITE (110): Xaa equals any of the naturally occurring L-amino acids
  SITE (116): Xaa equals any of the naturally occurring L-amino acids
  SITE (118): Xaa equals any of the naturally occurring L-amino acids
  SITE (121): Xaa equals any of the naturally occurring L-amino acids
  SITE (124): Xaa equals any of the naturally occurring L-amino acids
  SITE (126): Xaa equals any of the naturally occurring L-amino acids
  SITE (128): Xaa equals any of the naturally occurring L-amino acids
  SITE (130): Xaa equals any of the naturally occurring L-amino acids
  SITE (134): Xaa equals any of the naturally occurring L-amino acids
FGTRERERERERERERVAXVXVSSVSRLLXRXXPXLGRSMSSGAHGEEXSXXMWKXLTFFVALPGVXXXXLXVYLKSHHGEHEXPEFIVYPYLRIRXKXFPWGDXXHTFXHNPYVXPXPLXTEXYXEXLXITGXTGP

SEQ ID NO: 1062 - protein, 61 aa, Homo sapiens
  SITE (3): Xaa equals any of the naturally occurring L-amino acids
  SITE (5): Xaa equals any of the naturally occurring L-amino acids
  SITE (9): Xaa equals any of the naturally occurring L-amino acids
  SITE (12): Xaa equals any of the naturally occurring L-amino acids
  SITE (34): Xaa equals any of the naturally occurring L-amino acids
  SITE (48): Xaa equals any of the naturally occurring L-amino acids
  SITE (53): Xaa equals any of the naturally occurring L-amino acids
  SITE (59): Xaa equals any of the naturally occurring L-amino acids
GLXFXGMHXMAXTHWPCPWPALMTRWTVSLRAPXLAQLSDVAMHSLGXAFIYXQTDDIXDV

SEQ ID NO: 1063 - protein, 68 aa, Homo sapiens
  SITE (3): Xaa equals any of the naturally occurring L-amino acids
  SITE (5): Xaa equals any of the naturally occurring L-amino acids
  SITE (7): Xaa equals any of the naturally occurring L-amino acids
  SITE (15): Xaa equals any of the naturally occurring L-amino acids
  SITE (21): Xaa equals any of the naturally occurring L-amino acids
  SITE (35): Xaa equals any of the naturally occurring L-amino acids
  SITE (44): Xaa equals any of the naturally occurring L-amino acids
  SITE (49): Xaa equals any of the naturally occurring L-amino acids
  SITE (53): Xaa equals any of the naturally occurring L-amino acids
TYXPXSXGICRVSLXLPQQWXTFAKIWYILDGKMXPPGKLAAMXSIRLXGLHXPAYHALTDCGDHVCY

SEQ ID NO: 1064 - protein, 139 aa, Homo sapiens
  SITE (11): Xaa equals any of the naturally occurring L-amino acids
RDIEPGEEISXYYGDGFFGENNEFCECYTCERRGTGAFKSRVGLPAPAPVINSKYGLRETDKRLNRLKKLGDSSKNSDSQSVSSNTDADTTQEKNNATSNRKSSVGVKKNSKSRTLTRQSMSRIPASSNSTSSKLNSYK

SEQ ID NO: 1065 - protein, 78 aa, Homo sapiens
  SITE (5): Xaa equals any of the naturally occurring L-amino acids
  SITE (6): Xaa equals any of the naturally occurring L-amino acids
  SITE (14): Xaa equals any of the naturally occurring L-amino acids
  SITE (26): Xaa equals any of the naturally occurring L-amino acids
  SITE (37): Xaa equals any of the naturally occurring L-amino acids
  SITE (41): Xaa equals any of the naturally occurring L-amino acids
  SITE (43): Xaa equals any of the naturally occurring L-amino acids
  SITE (55): Xaa equals any of the naturally occurring L-amino acids
  SITE (62): Xaa equals any of the naturally occurring L-amino acids
  SITE (64): Xaa equals any of the naturally occurring L-amino acids
  SITE (70): Xaa equals any of the naturally occurring L-amino acids
  SITE (75): Xaa equals any of the naturally occurring L-amino acids
GTCHXXPWGPMEPXKRPWRLLMDTFXCKLLPWGVKVXHHPXWXLQDRVSEETWVXWEKRQQXAXGPTLSXELLQXLRE

SEQ ID NO: 1066 - protein, 67 aa, Homo sapiens
LERHHLEFGKTLLRDESLNIFQNLNRRQHEHAIHMMDIAIIATDLALYFKKRTMFQKIVDQSKTYES

SEQ ID NO: 1067 - protein, 98 aa, Homo sapiens
  SITE (4): Xaa equals any of the naturally occurring L-amino acids
  SITE (8): Xaa equals any of the naturally occurring L-amino acids
  SITE (27): Xaa equals any of the naturally occurring L-amino acids
  SITE (37): Xaa equals any of the naturally occurring L-amino acids
  SITE (68): Xaa equals any of the naturally occurring L-amino acids
  SITE (69): Xaa equals any of the naturally occurring L-amino acids
  SITE (73): Xaa equals any of the naturally occurring L-amino acids
  SITE (83): Xaa equals any of the naturally occurring L-amino acids
SARXWNTXWNPKNSDSGKYWGKSWLPXNYTLVDMKIXFGVDITTKEMVLADDSWRLAITSIEANSKDXXSYWXLKEVTPEGLXMVKKSFEAGHGDSCL

SEQ ID NO: 1068 - protein, 167 aa, Homo sapiens
  SITE (68): Xaa equals any of the naturally occurring L-amino acids
  SITE (69): Xaa equals any of the naturally occurring L-amino acids
  SITE (92): Xaa equals any of the naturally occurring L-amino acids
  SITE (95): Xaa equals any of the naturally occurring L-amino acids
  SITE (103): Xaa equals any of the naturally occurring L-amino acids
  SITE (106): Xaa equals any of the naturally occurring L-amino acids
  SITE (115): Xaa equals any of the naturally occurring L-amino acids
  SITE (121): Xaa equals any of the naturally occurring L-amino acids
  SITE (127): Xaa equals any of the naturally occurring L-amino acids
  SITE (140): Xaa equals any of the naturally occurring L-amino acids
  SITE (141): Xaa equals any of the naturally occurring L-amino acids
  SITE (142): Xaa equals any of the naturally occurring L-amino acids
  SITE (143): Xaa equals any of the naturally occurring L-amino acids
  SITE (144): Xaa equals any of the naturally occurring L-amino acids
  SITE (146): Xaa equals any of the naturally occurring L-amino acids
  SITE (147): Xaa equals any of the naturally occurring L-amino acids
  SITE (148): Xaa equals any of the naturally occurring L-amino acids
  SITE (149): Xaa equals any of the naturally occurring L-amino acids
  SITE (154): Xaa equals any of the naturally occurring L-amino acids
  SITE (157): Xaa equals any of the naturally occurring L-amino acids
  SITE (165): Xaa equals any of the naturally occurring L-amino acids
SVSLMSDLEGNTKSRVRLLVLVPPSKPECGIEGETIIGNNIQLTCQSKEGSPTPPVQLERSYNILNQXXPLAPPTSGSTCSPLKNISHRTHXVYXLVPPSNKXGNXFLQLHGGLXNLPPIXFGPFFXLPGGVFFFTPLIXXXXXLXXXXPGERXNPXKKGKPGTXTL

SEQ ID NO: 1069 - protein, 142 aa, Homo sapiens
VLPPLLIMLVIYIKIFLVACRQLQRTELMDHSRTTLQREIHAAKSLAMIVGIFALCWLPVHAVNCVTLFQPAQGKNKPKWAMNMAILLSHANSVVNPIVYAYRNRDFRYTFHKIISRYLLCQADVKSGNGQAGVQPALGVGL

SEQ ID NO: 1070 - protein, 44 aa, Homo sapiens
  SITE (15): Xaa equals any of the naturally occurring L-amino acids
  SITE (22): Xaa equals any of the naturally occurring L-amino acids
  SITE (25): Xaa equals any of the naturally occurring L-amino acids
  SITE (28): Xaa equals any of the naturally occurring L-amino acids
  SITE (30): Xaa equals any of the naturally occurring L-amino acids
  SITE (35): Xaa equals any of the naturally occurring L-amino acids
  SITE (36): Xaa equals any of the naturally occurring L-amino acids
  SITE (39): Xaa equals any of the naturally occurring L-amino acids
  SITE (44): Xaa equals any of the naturally occurring L-amino acids
AERKALLLQGSNEIXIRARGQXPLXLQXHXRWLHXXHRXPGARX

SEQ ID NO: 1071 - protein, 97 aa, Homo sapiens
  SITE (8): Xaa equals any of the naturally occurring L-amino acids
  SITE (55): Xaa equals any of the naturally occurring L-amino acids
  SITE (67): Xaa equals any of the naturally occurring L-amino acids
  SITE (79): Xaa equals any of the naturally occurring L-amino acids
MEAADYRXASSQQGLAYATEAVYESAEAPGHYPAEDSTYDEYENDLGITAVALYXYQAAGDDEISFXPDDIITNIEMIXDGWWRGVCKGRFRELAFS

SEQ ID NO: 1072 - protein, 76 aa, Homo sapiens
  SITE (9): Xaa equals any of the naturally occurring L-amino acids
  SITE (18): Xaa equals any of the naturally occurring L-amino acids
  SITE (24): Xaa equals any of the naturally occurring L-amino acids
  SITE (35): Xaa equals any of the naturally occurring L-amino acids
  SITE (36): Xaa equals any of the naturally occurring L-amino acids
  SITE (42): Xaa equals any of the naturally occurring L-amino acids
  SITE (48): Xaa equals any of the naturally occurring L-amino acids
  SITE (49): Xaa equals any of the naturally occurring L-amino acids
  SITE (53): Xaa equals any of the naturally occurring L-amino acids
  SITE (55): Xaa equals any of the naturally occurring L-amino acids
  SITE (56): Xaa equals any of the naturally occurring L-amino acids
  SITE (57): Xaa equals any of the naturally occurring L-amino acids
  SITE (62): Xaa equals any of the naturally occurring L-amino acids
  SITE (63): Xaa equals any of the naturally occurring L-amino acids
  SITE (64): Xaa equals any of the naturally occurring L-amino acids
  SITE (68): Xaa equals any of the naturally occurring L-amino acids
  SITE (69): Xaa equals any of the naturally occurring L-amino acids
  SITE (74): Xaa equals any of the naturally occurring L-amino acids
PCKDINTFXHGNKRRFKXICENKXWKPLQGNLRFXXVFFFQXTIWKVXXGVSXGXXXTFPGXXXGLKXXFFFFXKR

SEQ ID NO: 1073 - protein, 115 aa, Homo sapiens
  SITE (14): Xaa equals any of the naturally occurring L-amino acids
  SITE (32): Xaa equals any of the naturally occurring L-amino acids
  SITE (36): Xaa equals any of the naturally occurring L-amino acids
  SITE (92): Xaa equals any of the naturally occurring L-amino acids
  SITE (99): Xaa equals any of the naturally occurring L-amino acids
  SITE (106): Xaa equals any of the naturally occurring L-amino acids
  SITE (107): Xaa equals any of the naturally occurring L-amino acids
  SITE (110): Xaa equals any of the naturally occurring L-amino acids
HKQFASLEHGIVPXTSDCQYLFPAKVVSRLVXWVTXAHEDYMELHFTKDIVDAGLAGDTNLYYMALIERGTAKLQAAVVLNPGYSSIPPVFXLCLNWKXEKTNSNXXNIXGHGGR

SEQ ID NO: 1074 - protein, 56 aa, Homo sapiens
  SITE (4): Xaa equals any of the naturally occurring L-amino acids
  SITE (13): Xaa equals any of the naturally occurring L-amino acids
  SITE (19): Xaa equals any of the naturally occurring L-amino acids
  SITE (24): Xaa equals any of the naturally occurring L-amino acids
  SITE (37): Xaa equals any of the naturally occurring L-amino acids
  SITE (41): Xaa equals any of the naturally occurring L-amino acids
  SITE (54): Xaa equals any of the naturally occurring L-amino acids
SAHXCLINATSTXTEFLKXLVLPXIGSFTIIDGNQVXGQNXGNNFFLQKILSAXTD

SEQ ID NO: 1075 - protein, 146 aa, Homo sapiens
  SITE (41): Xaa equals any of the naturally occurring L-amino acids
  SITE (108): Xaa equals any of the naturally occurring L-amino acids
  SITE (114): Xaa equals any of the naturally occurring L-amino acids
  SITE (121): Xaa equals any of the naturally occurring L-amino acids
  SITE (128): Xaa equals any of the naturally occurring L-amino acids
GTSETPAGTILYHAHLDIEAFTMDREVRKIKQGLGLKFAEXVYTGFWHSPECEFVRHCIAKSQERVEGKVQVSVLKGQVYILGRESPLSLYNEELVSMDENLMHISYXAGILEXPKNQALXVLNEDPXPSQSPNNPDISEIEFKKG

SEQ ID NO: 1076 - protein, 130 aa, Homo sapiens
WIPRAAGRHVGVCGSGGRCSGLRGLAETHPFSVAAPSSALTAGRPTAVHPGESTVRTIAMDGTEGLVRGQKVLDSGAPIKIPVGPETLGRIMNVIGEPIDERGPIKTKQFAPIHAEAPEFMEMSVEQEIL

SEQ ID NO: 1077 - protein, 55 aa, Homo sapiens
GQGQDGATGAGLSAHQDYLKPRAEEERRIAAEEKKKQDELKRIARELAEDDSILK

SEQ ID NO: 1078 - protein, 71 aa, Homo sapiens
  SITE (45): Xaa equals any of the naturally occurring L-amino acids
  SITE (48): Xaa equals any of the naturally occurring L-amino acids
ERQRRGLHVQRLSGHLRVQDYNSRQGAQNDRPRQRRLTRISMILXRLXRFSSVIRSAVSVHLRRNIGVTAV

SEQ ID NO: 1079 - protein, 74 aa, Homo sapiens
  SITE (1): Xaa equals any of the naturally occurring L-amino acids
  SITE (7): Xaa equals any of the naturally occurring L-amino acids
  SITE (14): Xaa equals any of the naturally occurring L-amino acids
  SITE (23): Xaa equals any of the naturally occurring L-amino acids
  SITE (36): Xaa equals any of the naturally occurring L-amino acids
  SITE (38): Xaa equals any of the naturally occurring L-amino acids
  SITE (42): Xaa equals any of the naturally occurring L-amino acids
  SITE (43): Xaa equals any of the naturally occurring L-amino acids
  SITE (57): Xaa equals any of the naturally occurring L-amino acids
  SITE (60): Xaa equals any of the naturally occurring L-amino acids
  SITE (67): Xaa equals any of the naturally occurring L-amino acids
XGAVIIXFRSKIKXALAHFLSKXTPTPLIPILVIMXNXILLXXPIALGVSLIAYITXGHXLMHLIGXVPYNINH

SEQ ID NO: 1080 - protein, 39 aa, Homo sapiens
  SITE (5): Xaa equals any of the naturally occurring L-amino acids
  SITE (11): Xaa equals any of the naturally occurring L-amino acids
  SITE (13): Xaa equals any of the naturally occurring L-amino acids
  SITE (25): Xaa equals any of the naturally occurring L-amino acids
  SITE (38): Xaa equals any of the naturally occurring L-amino acids
TDYGXTATKQXVXAGTFFWSVVIPXLRRILTILQWLTXP

SEQ ID NO: 1081 - protein, 76 aa, Homo sapiens
  SITE (3): Xaa equals any of the naturally occurring L-amino acids
  SITE (4): Xaa equals any of the naturally occurring L-amino acids
GRXXKVLKRLRLQKRGTGGVDTAAVGGVFDVSNADRLGFSEVELVQMVVDGVKLLIEMEQRLEQGQAIDDLMPAQK

SEQ ID NO: 1082 - protein, 144 aa, Homo sapiens
PVTNEGSRDWTDAAMPLRLDIKRKLTARSDRVKSVDLHPTEPWMLASLYNGSVCVWNHETQTLVKTFEVCDLPVRAAKFVARKNWVVTGADDMQIRVFNYNTLERVHMFEAHSDYIRCIAVHPTQPFILTSSDDMLIKLWDWDK

SEQ ID NO: 1083 - protein, 120 aa, Homo sapiens
  SITE (3): Xaa equals any of the naturally occurring L-amino acids
  SITE (76): Xaa equals any of the naturally occurring L-amino acids
  SITE (82): Xaa equals any of the naturally occurring L-amino acids
EMXRSVALAVLALLSLSGLEAIQRTPKIQVYSRHPAENGKSNFLNCYVSGFHPSDIEVDLLKNGERIEKVEHSDLXFSKDWXFYLLYYTEFTPTEKDEYACRVNHVTLSQPKIVKWDRDM

SEQ ID NO: 1084 - protein, 149 aa, Homo sapiens
  SITE (17): Xaa equals any of the naturally occurring L-amino acids
PPAGTGPEFPGTAARRXQKGIPEADSIRAEMSRSVALAVLALLSLSGLEAIQRTPKIQVYSRHPAESGKSNFLNCYVSGFHPSDIEVDLLKNGERIEKVEHSDLSFSKDWSFYLLYYTEFTPTEKDEYACRVNHVTLSQPKIVKWDRDM

SEQ ID NO: 1085 - protein, 176 aa, Homo sapiens
  SITE (2): Xaa equals any of the naturally occurring L-amino acids
  SITE (5): Xaa equals any of the naturally occurring L-amino acids
  SITE (7): Xaa equals any of the naturally occurring L-amino acids
  SITE (11): Xaa equals any of the naturally occurring L-amino acids
  SITE (12): Xaa equals any of the naturally occurring L-amino acids
  SITE (40): Xaa equals any of the naturally occurring L-amino acids
  SITE (87): Xaa equals any of the naturally occurring L-amino acids
  SITE (88): Xaa equals any of the naturally occurring L-amino acids
  SITE (100): Xaa equals any of the naturally occurring L-amino acids
  SITE (104): Xaa equals any of the naturally occurring L-amino acids
  SITE (109): Xaa equals any of the naturally occurring L-amino acids
  SITE (110): Xaa equals any of the naturally occurring L-amino acids
  SITE (117): Xaa equals any of the naturally occurring L-amino acids
  SITE (122): Xaa equals any of the naturally occurring L-amino acids
  SITE (134): Xaa equals any of the naturally occurring L-amino acids
  SITE (142): Xaa equals any of the naturally occurring L-amino acids
  SITE (146): Xaa equals any of the naturally occurring L-amino acids
  SITE (170): Xaa equals any of the naturally occurring L-amino acids
  SITE (176): Xaa equals any of the naturally occurring L-amino acids
EXPGXDXTRPXXKFLKKKKKKKKKKGGRSRGSKLTYACMXRHSSSIVSPKFNSLAVVLQRRDWENPGVTQLNRLAAHPPFASWRNSXXARTDRPSQQLRXLNGXWDAPXXGALSAAXEVVTXSVTATLASALAXAPFAFFPXFLAXFAGFPRQALNRGLPLGFRFSALRXLRPQKX

SEQ ID NO: 1086 - protein, 166 aa, Homo sapiens
  SITE (4): Xaa equals any of the naturally occurring L-amino acids
  SITE (18): Xaa equals any of the naturally occurring L-amino acids
  SITE (88): Xaa equals any of the naturally occurring L-amino acids
  SITE (99): Xaa equals any of the naturally occurring L-amino acids
  SITE (124): Xaa equals any of the naturally occurring L-amino acids
  SITE (144): Xaa equals any of the naturally occurring L-amino acids
KKKXKKKKKKKKKKGGRXRGSKLTYACMRRHSSSIVSPKFNSLAVVLQRRDWENPGVTQLNRLAAHPPFASWRNSEEARTDRPSQQLXSLNGEWDAPCXGALSAAGVVVTRSVTVTLASALAPXPFAFFPSFLATFAGFPRQAXNRGLPLGFRFSALRHLDPKKLD

SEQ ID NO: 1087 - protein, 154 aa, Homo sapiens
  SITE (40): Xaa equals any of the naturally occurring L-amino acids
  SITE (42): Xaa equals any of the naturally occurring L-amino acids
  SITE (52): Xaa equals any of the naturally occurring L-amino acids
  SITE (75): Xaa equals any of the naturally occurring L-amino acids
  SITE (83): Xaa equals any of the naturally occurring L-amino acids
  SITE (84): Xaa equals any of the naturally occurring L-amino acids
  SITE (85): Xaa equals any of the naturally occurring L-amino acids
  SITE (86): Xaa equals any of the naturally occurring L-amino acids
  SITE (99): Xaa equals any of the naturally occurring L-amino acids
  SITE (113): Xaa equals any of the naturally occurring L-amino acids
  SITE (115): Xaa equals any of the naturally occurring L-amino acids
  SITE (122): Xaa equals any of the naturally occurring L-amino acids
  SITE (124): Xaa equals any of the naturally occurring L-amino acids
  SITE (129): Xaa equals any of the naturally occurring L-amino acids
  SITE (132): Xaa equals any of the naturally occurring L-amino acids
  SITE (146): Xaa equals any of the naturally occurring L-amino acids
  SITE (147): Xaa equals any of the naturally occurring L-amino acids
  SITE (149): Xaa equals any of the naturally occurring L-amino acids
  SITE (153): Xaa equals any of the naturally occurring L-amino acids
PTRPPTRPKKKKKKKKKKKKKKKKGGRSKGSKLTYACMQXHXSPIVSPKFNXLAVVLQRRDWENPGVTQLNRLAXHPPFASWXXXXKARTDRPSQQLRXLNGKWDAPCYGALXPXGVVVTPXVXRYTCXRPXARSFRFLPFLSRQXXPXFPVXL

SEQ ID NO: 1088 - protein, 166 aa, Homo sapiens
  SITE (13): Xaa equals any of the naturally occurring L-amino acids
  SITE (15): Xaa equals any of the naturally occurring L-amino acids
  SITE (36): Xaa equals any of the naturally occurring L-amino acids
  SITE (84): Xaa equals any of the naturally occurring L-amino acids
  SITE (122): Xaa equals any of the naturally occurring L-amino acids
  SITE (125): Xaa equals any of the naturally occurring L-amino acids
  SITE (131): Xaa equals any of the naturally occurring L-amino acids
  SITE (144): Xaa equals any of the naturally occurring L-amino acids
  SITE (159): Xaa equals any of the naturally occurring L-amino acids
  SITE (161): Xaa equals any of the naturally occurring L-amino acids
FFINHGCSQKKKXKXKKKKKKGGRSRGSKLTYACMXRHSSSIVSPKFNSLAVVLQRRDWENPGVTQLNRLAAHPPFASWRNSEXARTDRPSQQLRSLNGEWDAPCSGALSAAGVVVTRSVTXTLXSALTPXPFAFFPSFLPRSXGFPSSSKSGAPLRVXIXGFTGP

SEQ ID NO: 1089 - protein, 104 aa, Homo sapiens
  SITE (22): Xaa equals any of the naturally occurring L-amino acids
  SITE (74): Xaa equals any of the naturally occurring L-amino acids
  SITE (90): Xaa equals any of the naturally occurring L-amino acids
  SITE (93): Xaa equals any of the naturally occurring L-amino acids
  SITE (95): Xaa equals any of the naturally occurring L-amino acids
  SITE (99): Xaa equals any of the naturally occurring L-amino acids
NKKKKKRAAALEDPKLTYACMXRHSSSIVSPKFNSLGRRFTTSVTGKTLALPNLIRLAAHPPFASWRNSEEARXDRPSQQLRMLNGEWDXPCXGXIKAXRVWWL

SEQ ID NO: 1090 - protein, 129 aa, Homo sapiens
  SITE (3): Xaa equals any of the naturally occurring L-amino acids
  SITE (10): Xaa equals any of the naturally occurring L-amino acids
  SITE (20): Xaa equals any of the naturally occurring L-amino acids
  SITE (24): Xaa equals any of the naturally occurring L-amino acids
  SITE (25): Xaa equals any of the naturally occurring L-amino acids
  SITE (35): Xaa equals any of the naturally occurring L-amino acids
  SITE (37): Xaa equals any of the naturally occurring L-amino acids
  SITE (42): Xaa equals any of the naturally occurring L-amino acids
  SITE (83): Xaa equals any of the naturally occurring L-amino acids
  SITE (94): Xaa equals any of the naturally occurring L-amino acids
  SITE (99): Xaa equals any of the naturally occurring L-amino acids
  SITE (114): Xaa equals any of the naturally occurring L-amino acids
  SITE (117): Xaa equals any of the naturally occurring L-amino acids
  SITE (119): Xaa equals any of the naturally occurring L-amino acids
PTXPKKKKKXKKKKKKKKKXGGRXXGSKLTYACMXRXSSSIXSPKFNSLAVVLQRRDWENPGVTQLNRLAAHPPFASWRNSEXARTDRPSQQLXSLNGXWDAPCSGALSAAGVXVTXSXTVTLASALAP

SEQ ID NO: 1091 - protein, 78 aa, Homo sapiens
  SITE (38): Xaa equals any of the naturally occurring L-amino acids
  SITE (39): Xaa equals any of the naturally occurring L-amino acids
  SITE (40): Xaa equals any of the naturally occurring L-amino acids
  SITE (41): Xaa equals any of the naturally occurring L-amino acids
  SITE (43): Xaa equals any of the naturally occurring L-amino acids
  SITE (44): Xaa equals any of the naturally occurring L-amino acids
  SITE (46): Xaa equals any of the naturally occurring L-amino acids
  SITE (47): Xaa equals any of the naturally occurring L-amino acids
  SITE (48): Xaa equals any of the naturally occurring L-amino acids
  SITE (56): Xaa equals any of the naturally occurring L-amino acids
  SITE (64): Xaa equals any of the naturally occurring L-amino acids
  SITE (66): Xaa equals any of the naturally occurring L-amino acids
  SITE (68): Xaa equals any of the naturally occurring L-amino acids
  SITE (70): Xaa equals any of the naturally occurring L-amino acids
  SITE (71): Xaa equals any of the naturally occurring L-amino acids
  SITE (75): Xaa equals any of the naturally occurring L-amino acids
ETAMTMITPSSNTTHYRESWYACRYRSGIPGSTHASGXXXXGXXSXXXRKIVQRGXNECGSRGXPXSXGXXSFGXKKC

SEQ ID NO: 1092 - protein, 77 aa, Homo sapiens
  SITE (18): Xaa equals any of the naturally occurring L-amino acids
  SITE (33): Xaa equals any of the naturally occurring L-amino acids
  SITE (65): Xaa equals any of the naturally occurring L-amino acids
  SITE (68): Xaa equals any of the naturally occurring L-amino acids
  SITE (69): Xaa equals any of the naturally occurring L-amino acids
  SITE (70): Xaa equals any of the naturally occurring L-amino acids
  SITE (72): Xaa equals any of the naturally occurring L-amino acids
KKKKKKKKKKKKKGGRSXGSKLTYACMRRHSSXIVSPKFNSLAVVLQRRDWENPGVTQLNRLAAXPPXXXWXIPKGP

SEQ ID NO: 1093 - protein, 93 aa, Homo sapiens
  SITE (63): Xaa equals any of the naturally occurring L-amino acids
  SITE (71): Xaa equals any of the naturally occurring L-amino acids
  SITE (75): Xaa equals any of the naturally occurring L-amino acids
TFQNLKKKKKGGRSRGSKLTYACMRRHSSSIVSPKFNSLAVVLQRRDWENPGVTQLNRLAAHXPFAAGVIXKRPXRSPFPTVAQPEWRMGRAL

SEQ ID NO: 1094 - protein, 44 aa, Homo sapiens
  SITE (1): Xaa equals any of the naturally occurring L-amino acids
  SITE (4): Xaa equals any of the naturally occurring L-amino acids
  SITE (36): Xaa equals any of the naturally occurring L-amino acids
XRPXLETPDYRESWYACRYRSGIPGSTHASARLEAXRRMLGISP

SEQ ID NO: 1095 - protein, 69 aa, Homo sapiens
  SITE (15): Xaa equals any of the naturally occurring L-amino acids
  SITE (22): Xaa equals any of the naturally occurring L-amino acids
  SITE (65): Xaa equals any of the naturally occurring L-amino acids
  SITE (66): Xaa equals any of the naturally occurring L-amino acids
  SITE (67): Xaa equals any of the naturally occurring L-amino acids
  SITE (69): Xaa equals any of the naturally occurring L-amino acids
NVPCKYKHILSEKKXKKGGRSXGSKLTYACMRRHSSSIVSPKFNSLAVVLQRRDWEKPWALPNLXXXCX

SEQ ID NO: 1096 - protein, 48 aa, Homo sapiens
  SITE (2): Xaa equals any of the naturally occurring L-amino acids
  SITE (3): Xaa equals any of the naturally occurring L-amino acids
  SITE (7): Xaa equals any of the naturally occurring L-amino acids
  SITE (19): Xaa equals any of the naturally occurring L-amino acids
  SITE (47): Xaa equals any of the naturally occurring L-amino acids
  SITE (48): Xaa equals any of the naturally occurring L-amino acids
GXXSTVXIPGSRDPSLRTXHARHSSSIVSPKFNSLAVVLQRRDWENXX

SEQ ID NO: 1097 - protein, 47 aa, Homo sapiens
  SITE (2): Xaa equals any of the naturally occurring L-amino acids
  SITE (3): Xaa equals any of the naturally occurring L-amino acids
  SITE (5): Xaa equals any of the naturally occurring L-amino acids
  SITE (18): Xaa equals any of the naturally occurring L-amino acids
  SITE (41): Xaa equals any of the naturally occurring L-amino acids
KXXKXGGRSRGSKLTYAXMRRHSSSIGSPKFNSLAVVLQRXDWENPG

SEQ ID NO: 1098 - protein, 48 aa, Homo sapiens
SETPSQKKKKKTRGGARYPIRPIVSRITIPLAVVLQRRDWENPGRYPT

SEQ ID NO: 1099 - protein, 66 aa, Homo sapiens
  SITE (2): Xaa equals any of the naturally occurring L-amino acids
  SITE (3): Xaa equals any of the naturally occurring L-amino acids
  SITE (12): Xaa equals any of the naturally occurring L-amino acids
  SITE (55): Xaa equals any of the naturally occurring L-amino acids
  SITE (58): Xaa equals any of the naturally occurring L-amino acids
  SITE (62): Xaa equals any of the naturally occurring L-amino acids
  SITE (65): Xaa equals any of the naturally occurring L-amino acids
  SITE (66): Xaa equals any of the naturally occurring L-amino acids
TXXKKKRAAALXDPSLRTPCMRRHNSSIGAPKFNSLARRLQRLTGKTLALPNLIXLQXIPFXQLXX

SEQ ID NO: 1100 - protein, 71 aa, Homo sapiens
  SITE (19): Xaa equals any of the naturally occurring L-amino acids
  SITE (21): Xaa equals any of the naturally occurring L-amino acids
  SITE (28): Xaa equals any of the naturally occurring L-amino acids
  SITE (32): Xaa equals any of the naturally occurring L-amino acids
  SITE (33): Xaa equals any of the naturally occurring L-amino acids
  SITE (34): Xaa equals any of the naturally occurring L-amino acids
  SITE (44): Xaa equals any of the naturally occurring L-amino acids
  SITE (49): Xaa equals any of the naturally occurring L-amino acids
  SITE (71): Xaa equals any of the naturally occurring L-amino acids
MLNYFQKKKKKKKKKKGGXSXGSKLTYXCMQXXXSSIVSPKFNXLAVDXQRRDWENPGVTQLNRLAAHPPX

SEQ ID NO: 1101 - protein, 114 aa, Homo sapiens
  SITE (7): Xaa equals any of the naturally occurring L-amino acids
  SITE (8): Xaa equals any of the naturally occurring L-amino acids
  SITE (9): Xaa equals any of the naturally occurring L-amino acids
  SITE (12): Xaa equals any of the naturally occurring L-amino acids
  SITE (13): Xaa equals any of the naturally occurring L-amino acids
  SITE (22): Xaa equals any of the naturally occurring L-amino acids
  SITE (26): Xaa equals any of the naturally occurring L-amino acids
  SITE (32): Xaa equals any of the naturally occurring L-amino acids
  SITE (63): Xaa equals any of the naturally occurring L-amino acids
  SITE (88): Xaa equals any of the naturally occurring L-amino acids
  SITE (93): Xaa equals any of the naturally occurring L-amino acids
  SITE (102): Xaa equals any of the naturally occurring L-amino acids
  SITE (113): Xaa equals any of the naturally occurring L-amino acids
PVSRRSXXXKKXXKKNSKSFSXVLLXRPRAHXFSTRVGYQVSVPNSPYSESYYNSLAVVLQRXDWENPGVTQLNRLAAHPPFASWRNXEKGRXDRPSQQFAXPEMANGNQFLXV

SEQ ID NO: 1102 - protein, 152 aa, Homo sapiens
  SITE (2): Xaa equals any of the naturally occurring L-amino acids
  SITE (7): Xaa equals any of the naturally occurring L-amino acids
  SITE (11): Xaa equals any of the naturally occurring L-amino acids
  SITE (29): Xaa equals any of the naturally occurring L-amino acids
  SITE (32): Xaa equals any of the naturally occurring L-amino acids
  SITE (65): Xaa equals any of the naturally occurring L-amino acids
  SITE (76): Xaa equals any of the naturally occurring L-amino acids
  SITE (80): Xaa equals any of the naturally occurring L-amino acids
  SITE (88): Xaa equals any of the naturally occurring L-amino acids
  SITE (89): Xaa equals any of the naturally occurring L-amino acids
  SITE (93): Xaa equals any of the naturally occurring L-amino acids
  SITE (94): Xaa equals any of the naturally occurring L-amino acids
  SITE (95): Xaa equals any of the naturally occurring L-amino acids
  SITE (99): Xaa equals any of the naturally occurring L-amino acids
  SITE (111): Xaa equals any of the naturally occurring L-amino acids
  SITE (116): Xaa equals any of the naturally occurring L-amino acids
  SITE (118): Xaa equals any of the naturally occurring L-amino acids
  SITE (119): Xaa equals any of the naturally occurring L-amino acids
  SITE (127): Xaa equals any of the naturally occurring L-amino acids
  SITE (151): Xaa equals any of the naturally occurring L-amino acids
NXKKKKXKKKXKKKGGRSKGSKLTYACMXRHXSAIVSPKFNSLAVVLQRRDWENPGVTQLNRLAXHPPFARWRNSXKARXDRPSQQLXXLNGXXXAPCXGALSAAGVVVTXRVTAXLXXALAPGPFXFFPSFLATFAGFPRQALNRGVPFXV

SEQ ID NO: 1103 - protein, 143 aa, Homo sapiens
  SITE (20): Xaa equals any of the naturally occurring L-amino acids
  SITE (30): Xaa equals any of the naturally occurring L-amino acids
  SITE (37): Xaa equals any of the naturally occurring L-amino acids
  SITE (100): Xaa equals any of the naturally occurring L-amino acids
  SITE (123): Xaa equals any of the naturally occurring L-amino acids
  SITE (132): Xaa equals any of the naturally occurring L-amino acids
  SITE (135): Xaa equals any of the naturally occurring L-amino acids
  SITE (143): Xaa equals any of the naturally occurring L-amino acids
INKKKKKKKKKKKKKGGRSXGSKLTYACMXRHSSSIXSPKFNSLAVVLQRRDWENPGVTQLNRLAAHPPFASWRNSEKARTDRPSQQLRSLNGEWDAPCXGALSAAGVVVTRSVTVTLASALXPAPFVSSLXFSXRSPVSPLX

SEQ ID NO: 1104 - protein, 93 aa, Homo sapiens
RKKKKKGGRSRGSKLTYACMRRHSSSIVSPKFNSLAVVLQRRDWENPGVTQLNRLAAHPPFASWRNSEEARTDRPSQQLRSLNGEWDAPCTAH

SEQ ID NO: 1105 - protein, 55 aa, Homo sapiens [sequence omitted]

SEQ ID NO: 1106 - protein, 73 aa, Homo sapiens
  SITE (30): Xaa equals any of the naturally occurring L-amino acids
  SITE (36): Xaa equals any of the naturally occurring L-amino acids
  SITE (37): Xaa equals any of the naturally occurring L-amino acids
  SITE (54): Xaa equals any of the naturally occurring L-amino acids
  SITE (62): Xaa equals any of the naturally occurring L-amino acids
  SITE (70): Xaa equals any of the naturally occurring L-amino acids
PWHVFCISGRPAAQDHSNDPPNKMNEVTYXTLNFEXXQPTQPTSASPSLTATEXIYSRSKKXVMKPGPAXCSA

SEQ ID NO: 1107 - protein, 137 aa, Homo sapiens
  SITE (121): Xaa equals any of the naturally occurring L-amino acids
SSHNRVNARLAGAPSEDPQFPKVQWPPRELCSACHNERLDVPVWDVEATLNFLKAHFSPSNIILDFPAAGSTCPRDVQNVASRPKLAMGALELESRNSTLDPGKPEMMKSPTNTTPHVPAXGPEASRPPKLAPWPKT

SEQ ID NO: 1108 - protein, 39 aa, Homo sapiens
QYKGSWPALQLQHLPHPEWESGGATCWAPPELCTHLAMY

SEQ ID NO: 1109 - protein, 31 aa, Homo sapiens
ADFDRFKVMKAKKMRNRIIKNELRSFKRQLS

SEQ ID NO: 1110 - protein, 71 aa, Homo sapiens
  SITE (14): Xaa equals any of the naturally occurring L-amino acids
  SITE (30): Xaa equals any of the naturally occurring L-amino acids
  SITE (37): Xaa equals any of the naturally occurring L-amino acids
  SITE (38): Xaa equals any of the naturally occurring L-amino acids
  SITE (48): Xaa equals any of the naturally occurring L-amino acids
  SITE (57): Xaa equals any of the naturally occurring L-amino acids
  SITE (59): Xaa equals any of the naturally occurring L-amino acids
  SITE (63): Xaa equals any of the naturally occurring L-amino acids
KIMASPDWGYDDKXGPEQWSKLYPIANGNXQSPVDIXXSETKHDTSLXPISVSYNPXTXKEIXQCGGIPSM

SEQ ID NO: 1111 - protein, 88 aa, Homo sapiens
  SITE (78): Xaa equals any of the naturally occurring L-amino acids
KIMASPDWGYDDKNGPEQWSKLYPIANGNNQSPVDIKTSETKHDTSLKPISVSYNPATAKEIINVGHSFHVNFEDNDXRSSAERWSFL

SEQ ID NO: 1112 - protein, 120 aa, Homo sapiens
  SITE (11): Xaa equals any of the naturally occurring L-amino acids
  SITE (14): Xaa equals any of the naturally occurring L-amino acids
  SITE (17): Xaa equals any of the naturally occurring L-amino acids
  SITE (46): Xaa equals any of the naturally occurring L-amino acids
  SITE (54): Xaa equals any of the naturally occurring L-amino acids
  SITE (58): Xaa equals any of the naturally occurring L-amino acids
  SITE (86): Xaa equals any of the naturally occurring L-amino acids
  SITE (90): Xaa equals any of the naturally occurring L-amino acids
GADSCPAPTAXRTXSHXWGYGKHNGPKHWHKDFPIAKGRAPVPLLXSTLHTAKXEPFXESPCLFPMNQATSLRILNNGHAFNVGVXMTLXDKAVLQGKDPWVGHFTDWFSFFQFSMGVSI

SEQ ID NO: 1113 - protein, 50 aa, Homo sapiens
  SITE (22): Xaa equals any of the naturally occurring L-amino acids
  SITE (36): Xaa equals any of the naturally occurring L-amino acids
MLLENKASIFGGGLPAPYQVKXLHLHWSDLPYKGSXHSLEWGALCHGRCT

SEQ ID NO: 1114 - protein, 84 aa, Homo sapiens
  SITE (21): Xaa equals any of the naturally occurring L-amino acids
  SITE (33): Xaa equals any of the naturally occurring L-amino acids
  SITE (51): Xaa equals any of the naturally occurring L-amino acids
  SITE (57): Xaa equals any of the naturally occurring L-amino acids
  SITE (62): Xaa equals any of the naturally occurring L-amino acids
  SITE (65): Xaa equals any of the naturally occurring L-amino acids
KPFKMIPGVVDGVFLPRHPQXLLASADFQPVPXIVGVNNNEFGWLIPKVMXIYDTQXEMDRXASXAALQKMLTLLICLLHLVTC

SEQ ID NO: 1115 - protein, 40 aa, Homo sapiens
  SITE (18): Xaa equals any of the naturally occurring L-amino acids
  SITE (19): Xaa equals any of the naturally occurring L-amino acids
  SITE (38): Xaa equals any of the naturally occurring L-amino acids
CTQELFIPNITVNNRGSXXCQAHNSTLALIGAQSRISXSM

SEQ ID NO: 1116 - protein, 151 aa, Homo sapiens
  SITE (132): Xaa equals any of the naturally occurring L-amino acids
  SITE (141): Xaa equals any of the naturally occurring L-amino acids
GTAELTVTAALTREFLEPKLFSTEDKQAAETMGSPSACPYRVCIPWQGLLLTASLLTFWNLPNSAQTNIDVVPFNVAEGKEVLLVVHNESQNLYGYNWYKGERVHANYRIIGYCKKYKSRKCPRPDTTSRDXYPMEPCVPXVPHAQDFSSL

SEQ ID NO: 1117 - protein, 115 aa, Homo sapiens
  SITE (35): Xaa equals any of the naturally occurring L-amino acids
  SITE (113): Xaa equals any of the naturally occurring L-amino acids
REQKLELHRGATALELVDPPGCRNSARGRPGLARXPRRGLEARPGAPERESERRRGDQINASKNEEDAGKMFVGGLSWDTSKKDLKDYFTKFGEVVDCTIKMDPNTGRSRGFXFI

SEQ ID NO: 1118 - protein, 50 aa, Homo sapiens
  SITE (4): Xaa equals any of the naturally occurring L-amino acids
  SITE (14): Xaa equals any of the naturally occurring L-amino acids
  SITE (16): Xaa equals any of the naturally occurring L-amino acids
  SITE (20): Xaa equals any of the naturally occurring L-amino acids
  SITE (28): Xaa equals any of the naturally occurring L-amino acids
  SITE (29): Xaa equals any of the naturally occurring L-amino acids
  SITE (41): Xaa equals any of the naturally occurring L-amino acids
RPTXPGRTMARGAXLXLLLXGLLGVLVXXPDGGFDLSDALXDNENKKPTA

SEQ ID NO: 1119 - protein, 147 aa, Homo sapiens
  SITE (1): Xaa equals any of the naturally occurring L-amino acids
  SITE (11): Xaa equals any of the naturally occurring L-amino acids
  SITE (13): Xaa equals any of the naturally occurring L-amino acids
  SITE (95): Xaa equals any of the naturally occurring L-amino acids
XSECKSPSEPXIXKRVGLIHISQVISEIDGNRMTLSQEGAQDSFPLQQKILVCSLMLLIRQLKIKEVTLGKLYEAYSKVCRKQQVAAVDQSECLXLSGLLEARGILGLKRNKETRLTKVFFKIEEKEIEHALKDKALIGNILATGLP

SEQ ID NO: 1120 - protein, 45 aa, Homo sapiens
HERNMERLTLACGGVALNSFEDLSPDCLGHAGLVYEYTLGEVHLY

SEQ ID NO: 1121 - protein, 67 aa, Homo sapiens
  SITE (7): Xaa equals any of the naturally occurring L-amino acids
  SITE (52): Xaa equals any of the naturally occurring L-amino acids
  SITE (53): Xaa equals any of the naturally occurring L-amino acids
  SITE (60): Xaa equals any of the naturally occurring L-amino acids
  SITE (66): Xaa equals any of the naturally occurring L-amino acids
NWRMRMXHVMLPKDIAKLVPKTHLMSESEWRNLGVQQSQGWVHYMIHEPEPXXLLFRGHXQEPRNXV

SEQ ID NO: 1122 - protein, 64 aa, Homo sapiens
  SITE (13): Xaa equals any of the naturally occurring L-amino acids
  SITE (17): Xaa equals any of the naturally occurring L-amino acids
  SITE (19): Xaa equals any of the naturally occurring L-amino acids
  SITE (20): Xaa equals any of the naturally occurring L-amino acids
  SITE (22): Xaa equals any of the naturally occurring L-amino acids
  SITE (23): Xaa equals any of the naturally occurring L-amino acids
  SITE (25): Xaa equals any of the naturally occurring L-amino acids
  SITE (28): Xaa equals any of the naturally occurring L-amino acids
  SITE (41): Xaa equals any of the naturally occurring L-amino acids
  SITE (42): Xaa equals any of the naturally occurring L-amino acids
  SITE (47): Xaa equals any of the naturally occurring L-amino acids
  SITE (60): Xaa equals any of the naturally occurring L-amino acids
  SITE (64): Xaa equals any of the naturally occurring L-amino acids
SCCLGWTWFCLLXPLLXLXXNXXQXASXMVHKQIYYSDKYXXEHYEXRDGMLPRELDKQXPKTX

SEQ ID NO: 1123 - protein, 155 aa, Homo sapiens
  SITE (10): Xaa equals any of the naturally occurring L-amino acids
  SITE (14): Xaa equals any of the naturally occurring L-amino acids
  SITE (15): Xaa equals any of the naturally occurring L-amino acids
  SITE (31): Xaa equals any of the naturally occurring L-amino acids
  SITE (143): Xaa equals any of the naturally occurring L-amino acids
QLVGPPGLQXFGSXXKPYGVTAMCWNWEQVXAAGRHPESRPFRFTGAATSPRSSCSRACIVKVVRRRLAEKRIGVRDVRLNGSAASHVLHQDSGLGYKDLDLIFCADLRGEGEFQTVKDVVLDCLLDFLPEGVNKEKITPLTXKEAYVQKMVKVC

SEQ ID NO: 1124 - protein, 117 aa, Homo sapiens
  SITE (7): Xaa equals any of the naturally occurring L-amino acids
  SITE (87): Xaa equals any of the naturally occurring L-amino acids
  SITE (97): Xaa equals any of the naturally occurring L-amino acids
  SITE (99): Xaa equals any of the naturally occurring L-amino acids
  SITE (110): Xaa equals any of the naturally occurring L-amino acids
AKSFEYXARIFKQHFMDSRIPCLIVAAKSDLHEVKQEYSISPTDFCRKHKMPPPQAFTCNTADAPSKDIFGKLTTMAMYPHARLRCXCTCNRCTFCXCXNFLNLYFAANXVKEQKSF

SEQ ID NO: 1125 - protein, 169 aa, Homo sapiens
IMKLLTRAGSFSRFYSLKVAPKVKATAAPAGAPPQPQDLEFTKLPNGLVIASLENYSPVSRIGLFIKAGSRYEDFSNLGTTHLLRLTSSLTTKGASSFKITRGIEAVGGKLSVTATRENMAYTVECLRGDVDILMEFLLNVTTAPEFRRWEVADLQPQLKIDKAVAFQN

SEQ ID NO: 1126 - protein, 56 aa, Homo sapiens
PPVVHKNPIHIKTPSPCLQASTAINPQLSHINCNSKATPHPLGYQQTYPPLTVHST

SEQ ID NO: 1127 - protein, 195 aa, Homo sapiens
  SITE (39): Xaa equals any of the naturally occurring L-amino acids
REQKLELHRGAAALELVDPPGCRNSARAGGCVLGKAGGXGGRLFYGSRDRPVLLPFPPSLPPLSRRGAAAALDFAVFPRGDRFQHYTCTMSLKPRVVDFDETWNKLLTTIKAVVMLEYVERATWNDRFSDIYALCVAYPEPLGERLYTETKIFLENHVRHLHKRVLESEEQVLVMYHRYWEEYSKGADYMDCLYR

SEQ ID NO: 1128 - protein, 130 aa, Homo sapiens
  SITE (116): Xaa equals any of the naturally occurring L-amino acids
  SITE (122): Xaa equals any of the naturally occurring L-amino acids
SIIDRFMQNNCVPKKMLQLVGVTAMFIASKYEEMYPPEIGDFAFVTDNTYTKHQIRQMEMKILRALNFGLGRPLPLHFLRRASKIGEVDVEQHTLAKYLMELTMLDYDMVHFPPSXIAAGAXCLALKILG

SEQ ID NO: 1129 - protein, 125 aa, Homo sapiens
  SITE (90): Xaa equals any of the naturally occurring L-amino acids
GDEEACPEDKGPQDPQALALDTQIPATPGPKPLVRTSREPGKDVTTSGYSSVSTASPTSSVDGGLGALPQPTSVLSLDSDSHTQPCHHQXRKSCLQCRPPSPPESSVPQQQVKRINYAYTVKRRT

SEQ ID NO: 1130 - protein, 118 aa, Homo sapiens
  SITE (1): Xaa equals any of the naturally occurring L-amino acids
XTRPPTRPPTRPQIPSVAAKMMCGAPSATQPATAETQHIADQVRSQLEEKENKKFPVFKAVSFKSQVVAGTNYFIKVHVGDEDFVHLRVFQSLPHENKPLTLSNYQTNKAKHDELTYF

SEQ ID NO: 1131 - protein, 64 aa, Homo sapiens
AVPTLGLKTDAIPGRLNQTTFTATRPGVYYGQCSEICGANHSFMPIVLELIPLKIFEIGPVFTL

SEQ ID NO: 1132 - protein, 35 aa, Homo sapiens
ARAHKEIYPYVIQELRPTLNELGISTPEELGLDKV

SEQ ID NO: 1133 - protein, 69 aa, Homo sapiens
  SITE (9): Xaa equals any of the naturally occurring L-amino acids
  SITE (26): Xaa equals any of the naturally occurring L-amino acids
  SITE (61): Xaa equals any of the naturally occurring L-amino acids
  SITE (66): Xaa equals any of the naturally occurring L-amino acids
PYTNDGAMXHEESTYQGHHTPPVQKXLRYGIILFITSEVFFFAGFSELLHSSLALPPTKKXLAPTXITR

SEQ ID NO: 1134 - protein, 64 aa, Homo sapiens; identical to SEQ ID NO: 1131

SEQ ID NO: 1135 - protein, 56 aa, Homo sapiens
  SITE (3): Xaa equals any of the naturally occurring L-amino acids
TYXVHRLRRTNLQLLHTSPLFLEPGDLRLLDVDNRVVLPIEAPIRIIITSQDVLHS

SEQ ID NO: 1136 - protein, 60 aa, Homo sapiens
AQVGLQDATSPIIEELITFHDHALIIIFLICFLVLYALFLTLTTKLTNTNISDAQEIETV

SEQ ID NO: 1137 - protein, 49 aa, Homo sapiens
TYEYTDYGGLIFNSYILPPLFLEPGDLRLLDVDNRVVLPIEAPIRIIIN

SEQ ID NO: 1138 - protein, 80 aa, Homo sapiens
  SITE (74): Xaa equals any of the naturally occurring L-amino acids
  SITE (79): Xaa equals any of the naturally occurring L-amino acids
  SITE (80): Xaa equals any of the naturally occurring L-amino acids
AVPTLGLKTDAIPGRLNQTTFTATRPGVYYGQCSEICGANHSFMPIVLELIPLKIFGNRARIYPIAPPLPPLEXKKKKXX

SEQ ID NO: 1139 - protein, 75 aa, Homo sapiens
  SITE (17): Xaa equals any of the naturally occurring L-amino acids
  SITE (51): Xaa equals any of the naturally occurring L-amino acids
  SITE (70): Xaa equals any of the naturally occurring L-amino acids
FEANDPSLTIKSIGHQXYRTYEYTDYGGLIFNSYILPPLFLEPGDLRLLDXDNRVVLPIETPIRIIITYXDVLHS

SEQ ID NO: 1140 - protein, 200 aa, Homo sapiens
  SITE (2): Xaa equals any of the naturally occurring L-amino acids
HXPSLKGTKAGAPPRCGRSRTSGSPGLQEFGTREWRLPSLRRATLWIPQWFAKKAIFNSPLEAAMAFPHLQQPSFLLASLKADSINKPFAQQCQDLVKVIEDFPAKSEPIRVLVTGAAGQIAYSLLYSIGNGSVFGKDQMSSQQIKKTLPSKTWDVAILVGSMPRREGMERKDLLKANVKIFKSQGAALDKYGKKSVKGY

SEQ ID NO: 1141 - protein, 182 aa, Homo sapiens
  SITE (123): Xaa equals any of the naturally occurring L-amino acids
  SITE (126): Xaa equals any of the naturally occurring L-amino acids
  SITE (128): Xaa equals any of the naturally occurring L-amino acids
  SITE (137): Xaa equals any of the naturally occurring L-amino acids
  SITE (143): Xaa equals any of the naturally occurring L-amino acids
  SITE (157): Xaa equals any of the naturally occurring L-amino acids
  SITE (163): Xaa equals any of the naturally occurring L-amino acids
  SITE (165): Xaa equals any of the naturally occurring L-amino acids
  SITE (176): Xaa equals any of the naturally occurring L-amino acids
HEEHSIYCTVNNDEGEWSGPPPECRGKSLTSKVPPTVQKPTTVNVPTTEVSPTSQKTTTKTTTPNAQGTETPSVLQKHTTENVSATRTPPTPQKPTTVNVPATIVTPTPQKPTTLMFQLQESXQHXKXHLVMFQLQXLPLFGXHRGNVRHHSRAFGXSFKTFXKXFCVRSCGMFCXRPLRPG

SEQ ID NO: 1142 - protein, 143 aa, Homo sapiens
  SITE (4): Xaa equals any of the naturally occurring L-amino acids
  SITE (141): Xaa equals any of the naturally occurring L-amino acids
DGAXPGRAYALLLLLICFNVGSGLHLQVLSTRNENKLLPKHPHLVRQKRAWITAPVALREGEDLSKKNPIAKIHSDLAEERGLKITYKYTGKGITEPPFGIFVFNKDTGELNVTSILDREETPFFLLTGLRFGCKREQCRXTL

SEQ ID NO: 1143 - protein, 111 aa, Homo sapiens
AQSPSRSTGQDVAAEWGSEESVAGSLEAEFEKAAEEVRHLKTKPSDEEMLFIYGHYKQATVGDINTERPGMLDFTGKAKWDAWNELKGTSKEDAMKAYINKVEELKKKYGI

SEQ ID NO: 1144 - protein, 74 aa, Homo sapiens
  SITE (9): Xaa equals any of the naturally occurring L-amino acids
  SITE (20): Xaa equals any of the naturally occurring L-amino acids
  SITE (23): Xaa equals any of the naturally occurring L-amino acids
  SITE (30): Xaa equals any of the naturally occurring L-amino acids
  SITE (36): Xaa equals any of the naturally occurring L-amino acids
  SITE (38): Xaa equals any of the naturally occurring L-amino acids
  SITE (57): Xaa equals any of the naturally occurring L-amino acids
  SITE (64): Xaa equals any of the naturally occurring L-amino acids
  SITE (68): Xaa equals any of the naturally occurring L-amino acids
  SITE (72): Xaa equals any of the naturally occurring L-amino acids
ACAYTPPSXKAVQRIAESHXQSXSNLNENXASEEEXEXGELRELGYPREEDEEEEEXDEEEEDXEDSXAEDXSG

SEQ ID NO: 1145 - protein, 153 aa, Homo sapiens
  SITE (2): Xaa equals any of the naturally occurring L-amino acids
  SITE (18): Xaa equals any of the naturally occurring L-amino acids
  SITE (30): Xaa equals any of the naturally occurring L-amino acids
  SITE (35): Xaa equals any of the naturally occurring L-amino acids
  SITE (47): Xaa equals any of the naturally occurring L-amino acids
  SITE (59): Xaa equals any of the naturally occurring L-amino acids
  SITE (70): Xaa equals any of the naturally occurring L-amino acids
  SITE (110): Xaa equals any of the naturally occurring L-amino acids
  SITE (132): Xaa equals any of the naturally occurring L-amino acids
  SITE (143): Xaa equals any of the naturally occurring L-amino acids
NXPNAELGGPFNQMNGVXGNGMNNIDMTGXKKSLXLPYPSSFAPVSXPRNQTFTYMGKXSIDPQYPGASXYPEGIINIVSAGILQGVTSPASTTASSSVTSASPNPLATXPLGVCTMSQTQPDLDHLYSPPXPPPPYSGCAGXLYQDPSAFLL

SEQ ID NO: 1146 - protein, 32 aa, Homo sapiens
  SITE (1): Xaa equals any of the naturally occurring L-amino acids
  SITE (7): Xaa equals any of the naturally occurring L-amino acids
XFQIDPXLGTVGFGSGLHGWAFTLKAVCRECM

SEQ ID NO: 1147 - protein, 62 aa, Homo sapiens
  SITE (2): Xaa equals any of the naturally occurring L-amino acids
  SITE (6): Xaa equals any of the naturally occurring L-amino acids
  SITE (7): Xaa equals any of the naturally occurring L-amino acids
  SITE (8): Xaa equals any of the naturally occurring L-amino acids
AXHQRXXXIKRLSTEHSSVSEYHPADGYAFSSNIYTRGSHLDQGEAAVAFKPTSNRHIRLKL

SEQ ID NO: 1148 - protein, 60 aa, Homo sapiens
  SITE (7): Xaa equals any of the naturally occurring L-amino acids
  SITE (54): Xaa equals any of the naturally occurring L-amino acids
GRALRAXRLTQLTEILSGGVYIEKNDKLCHMDTIDWRDIVRDRDAEIVVKDNGXKLSPLS

SEQ ID NO: 1149 - protein, 49 aa, Homo sapiens
  SITE (23): Xaa equals any of the naturally occurring L-amino acids
FQTRNLQVTLEDGYIELSTSDRXGPIFKSPQTYMDGLLHYVSVISDNSG

SEQ ID NO: 1150 - protein, 55 aa, Homo sapiens
  SITE (5): Xaa equals any of the naturally occurring L-amino acids
  SITE (6): Xaa equals any of the naturally occurring L-amino acids
  SITE (21): Xaa equals any of the naturally occurring L-amino acids
  SITE (37): Xaa equals any of the naturally occurring L-amino acids
PAARXXVPRAMERASLIQKAXLAEQAERYEDMAAFMXGAVEKGEESPAKSETCSQ

SEQ ID NO: 1151 - protein, 162 aa, Homo sapiens
  SITE (3): Xaa equals any of the naturally occurring L-amino acids
  SITE (14): Xaa equals any of the naturally occurring L-amino acids
VSXGTGNSRVRTHXVPPRPLPCSEGGERLLPTQKQPGGGQVNSSRYKTELCRPFEENGACKYGDKCQFAHGIHELRSLTRHPKYKTELCRTFHTIGFCPYGPRCHFIHNAEERRALAGARDLSADRPRLQHSFSLLGFPVPLPPPLPPGCWTAHVHQPNPYF

SEQ ID NO: 1152 - protein, 124 aa, Homo sapiens
  SITE (15): Xaa equals any of the naturally occurring L-amino acids
  SITE (41): Xaa equals any of the naturally occurring L-amino acids
  SITE (114): Xaa equals any of the naturally occurring L-amino acids
HEGASRCGHLCRGRXAASYPALRASLLPQSLAAAAAFPTRXNSQESKTTYLEDLPPPPEYELAPSKLEEEVDDVFLIRAQGLPWVMALWEDVALTFFFQTCRIRQRLSNGNYIXLPKNKRWGKT

SEQ ID NO: 1153 - protein, 151 aa, Homo sapiens
  SITE (105): Xaa equals any of the naturally occurring L-amino acids
  SITE (140): Xaa equals any of the naturally occurring L-amino acids
  SITE (147): Xaa equals any of the naturally occurring L-amino acids
  SITE (149): Xaa equals any of the naturally occurring L-amino acids
AMVRLVKCDVYPCPNTVDCFVSRPTEKTVFTVFMLAASGICIILNVAEVVYLIIRACARRAQRRSNPPSRKGSGFGHRLSPEYKQNEINKLLSEQDGSLKDILRXTLARGLGWLKKTTVLGCDATYQATSHPTPTLPGRXPPSPCRXPXAH

SEQ ID NO: 1154 - protein, 113 aa, Homo sapiens
  SITE (26): Xaa equals any of the naturally occurring L-amino acids
  SITE (37): Xaa equals any of the naturally occurring L-amino acids
  SITE (103): Xaa equals any of the naturally occurring L-amino acids
  SITE (111): Xaa equals any of the naturally occurring L-amino acids
GSPWPNSCRPEARRDRLQPLGGVCEXASEHDVVNLGXGFPDFPPPDFAVEAFQHAVSGDFMLNQYTKTFGYPPLDEDPGNFFGGAAGSRIRPVQGCAGDCWWXWGPVSKAXPG

SEQ ID NO: 1155 - protein, 104 aa, Homo sapiens
  SITE (78): Xaa equals any of the naturally occurring L-amino acids
  SITE (91): Xaa equals any of the naturally occurring L-amino acids
GTTVRDYTQMNELQRRLGPRGLVVLGFPCNQFGHQENAKNEEILNSLKYVRPGGGFEPNFMLFEKCEVNGAGAHPLFXFLREALPAPSDDXTALMTDPKLITWS

SEQ ID NO: 1156 - protein, 38 aa, Homo sapiens
AFIAKSFYDLSAISLDGEKVDFNTSRGRAVLIENVASL

SEQ ID NO: 1157 - protein, 63 aa, Homo sapiens
DTTTRDFTQLNELQCRFPRRLVVLGFPCNQFGHQSRRDRSSKPSFEMSLQPQKYLQPHTISSA

SEQ ID NO: 1158 - protein, 67 aa, Homo sapiens
  SITE (50): Xaa equals any of the naturally occurring L-amino acids
TLKFFPASADRTVIDYNGERTLDGFKKFLESGGQDGAGDDDDLEDLEEAXEPDMEEDDDQKAVKDEL

SEQ ID NO: 1159 - protein, 214 aa, Homo sapiens
  SITE (202): Xaa equals any of the naturally occurring L-amino acids
  SITE (207): Xaa equals any of the naturally occurring L-amino acids
AVIMGAPGSGKGTVSSRITTHFELKHLSSGDLLRDNMLRGTEIGVLAKAFIDQGKLIPDDVMTRLALHELKNLTQYSWLLDGFPRTLPQAEALDRAYQIDTVINLNVPFEVIKQRLTARWIHPASGRVYNIEFNPPKTVGIDDLTGEPLIQREDDKPETVIKRLKAYEDQTKPVLEYYQKKGVLETFSGTETNKIWPYVYAXLQLKXHKEARKL

SEQ ID NO: 1160 - protein, 33 aa, Homo sapiens
  SITE (2): Xaa equals any of the naturally occurring L-amino acids
  SITE (4): Xaa equals any of the naturally occurring L-amino acids
LXSXKWIYNGFSSVLQFLGLYKKSGKLVFFRLG

SEQ ID NO: 1161 - protein, 123 aa, Homo sapiens
  SITE (17): Xaa equals any of the naturally occurring L-amino acids
  SITE (28): Xaa equals any of the naturally occurring L-amino acids
  SITE (30): Xaa equals any of the naturally occurring L-amino acids
  SITE (66): Xaa equals any of the naturally occurring L-amino acids
  SITE (88): Xaa equals any of the naturally occurring L-amino acids
  SITE (96): Xaa equals any of the naturally occurring L-amino acids
GNSKTEDQRNEEKAHVXANKKIEKQLQXDXQVYRATHRLLLLGAGESGKSTIVKQMRILHVNGFNXDSEKATKVQDIKNNLKEAIETXVAAMSNLXAPRGAGQPRETSSEWTTSWSVMNVPGF

SEQ ID NO: 1162 - protein, 87 aa, Homo sapiens
  SITE (60): Xaa equals any of the naturally occurring L-amino acids
  SITE (61): Xaa equals any of the naturally occurring L-amino acids
  SITE (70): Xaa equals any of the naturally occurring L-amino acids
  SITE (80): Xaa equals any of the naturally occurring L-amino acids
PTRPPTRPELKDLQEPQEPRVGKLRNFAPIPGEPVVPILCSNPNFPEELKPLCKSPMPRXXFRGWRKSLXDPGHMWKSVXTLACTGC

SEQ ID NO: 1163 - protein, 100 aa, Homo sapiens
  SITE (67): Xaa equals any of the naturally occurring L-amino acids
  SITE (68): Xaa equals any of the naturally occurring L-amino acids
VQGPYVLGTGLILYALSKEIYVISAETFTALSVLGVMVYGIKKYGPFVADFADKLNEQKLAQLEEAXXASIQHIQNAIDTEKSQQALVQKRHYLFGCAKE

SEQ ID NO: 1164 - protein, 186 aa, Homo sapiens
  SITE (171): Xaa equals any of the naturally occurring L-amino acids
  SITE (180): Xaa equals any of the naturally occurring L-amino acids
WIPRAAGIRHEVLCGHLAKMPEETQTQDQPMEEEEVETFAFQAEIAQLMSLIINTFYSNKEIFLRELISNSSDALDKIRYESLTDPSKLDSGKELHINLIPNKQDRTLTIVDTGIGMTKADLINNLGTIAKSGTKAFMEALQAGADISMIGQFGVGFYSAYLVAEKVTVIXKHNDDEQYXWESSAG

SEQ ID NO: 1165 - protein, 199 aa, Homo sapiens
  SITE (2): Xaa equals any of the naturally occurring L-amino acids
  SITE (54): Xaa equals any of the naturally occurring L-amino acids
  SITE (173): Xaa equals any of the naturally occurring L-amino acids
  SITE (191): Xaa equals any of the naturally occurring L-amino acids
  SITE (196): Xaa equals any of the naturally occurring L-amino acids
  SITE (197): Xaa equals any of the naturally occurring L-amino acids
AXICLLETAPSSRESQKEDMAAGQREARPQVSLTFEDVAVLFTWDEWRKLAPSXRNLYRDVMLENYRNLVSLGLSFTKPKVISLLQQGEDPWEVEKDSSGVSSLGCKSTPKMTKSTQTQDSFQEQIRKRLKRDEPWNFISERSCIYEEKLKKQQDKNENLQIISVAHTKILTXDRSHKNVEFAQNFYLKSXFIKHXXIA

SEQ ID NO: 1166 - protein, 91 aa, Homo sapiens
  SITE (86): Xaa equals any of the naturally occurring L-amino acids
WCCSHLWFQGRATPENYLFQGRQECYAFNGNSQKDILEEKAGSAGTGCADTTYGAGRAHGPCSAEFQPRVECFPPPSRGPLAATQXACLAK

SEQ ID NO: 1167 - protein, 118 aa, Homo sapiens
  SITE (82): Xaa equals any of the naturally occurring L-amino acids
  SITE (94): Xaa equals any of the naturally occurring L-amino acids
  SITE (111): Xaa equals any of the naturally occurring L-amino acids
  SITE (113): Xaa equals any of the naturally occurring L-amino acids
  SITE (114): Xaa equals any of the naturally occurring L-amino acids
  SITE (117): Xaa equals any of the naturally occurring L-amino acids
NVPAYKSSGQIMSSLYYANALFSKYPASSSVFATGAFPEQTSCAFASNPQRPGYGAGSGASFAASMQGLYPGGGGMAGQSAXGVYAAGYGLEPXSFNMHCAPFEQKPLRGXPXXIPXR

SEQ ID NO: 1168 - protein, 77 aa, Homo sapiens
  SITE (18): Xaa equals any of the naturally occurring L-amino acids
  SITE (22): Xaa equals any of the naturally occurring L-amino acids
  SITE (23): Xaa equals any of the naturally occurring L-amino acids
  SITE (48): Xaa equals any of the naturally occurring L-amino acids
SRSWGFGCSMLALETRAXPGHXXGCVTFVLNDHSMAFTGDALLIRGCXRTDFQQGCCQDLVTIRSMKRSFKISRRLS

SEQ ID NO: 1169 - protein, 115 aa, Homo sapiens
GPRHADFPCSAVVRKCLAAPGRRRGRQTYSRFQTLELEKEFLFNPYLTRKRRIEVSHALALTERQVKIWFQNRRMKWKKENNKDKFPVSRQEVKDGETKKEAQELEEDRAEGLTN

SEQ ID NO: 1170 - protein, 55 aa, Homo sapiens [sequence omitted]

SEQ ID NO: 1171 - protein, 130 aa, Homo sapiens
  SITE (5): Xaa equals any of the naturally occurring L-amino acids
  SITE (7): Xaa equals any of the naturally occurring L-amino acids
  SITE (23): Xaa equals any of the naturally occurring L-amino acids
  SITE (26): Xaa equals any of the naturally occurring L-amino acids
  SITE (34): Xaa equals any of the naturally occurring L-amino acids
  SITE (37): Xaa equals any of the naturally occurring L-amino acids
  SITE (39): Xaa equals any of the naturally occurring L-amino acids
  SITE (45): Xaa equals any of the naturally occurring L-amino acids
  SITE (87): Xaa equals any of the naturally occurring L-amino acids
  SITE (108): Xaa equals any of the naturally occurring L-amino acids
  SITE (128): Xaa equals any of the naturally occurring L-amino acids
  SITE (129): Xaa equals any of the naturally occurring L-amino acids
PTRPXTXPFGPRWHGMRKALPWXLVXLASLRAVXTSXMXTLPKRXKIVEVGPRDGLQNEKNIVSTPVKIKLIDMLSEAGLSVIETTXFESPKWVPQMGDHTEVLKGIXKFPGINYPVLTPNLKGFEAXXP

SEQ ID NO: 1172 - protein, 106 aa, Homo sapiens
  SITE (13): Xaa equals any of the naturally occurring L-amino acids
  SITE (28): Xaa equals any of the naturally occurring L-amino acids
  SITE (46): Xaa equals any of the naturally occurring L-amino acids
  SITE (51): Xaa equals any of the naturally occurring L-amino acids
  SITE (101): Xaa equals any of the naturally occurring L-amino acids
  SITE (103): Xaa equals any of the naturally occurring L-amino acids
AREDLDKALLKAXQDMFDKKTKASLYLXTHNGNMYTSSLYGCLASXLSHHXAQELAGSRIGAFSYGSGLAASFFSFRVSRLKVFCRSMESFWETYASRASXRXSYF

SEQ ID NO: 1173 - protein, 28 aa, Homo sapiens
PCKGSIITCSLNRDLYEWLHEGSAVSYF

SEQ ID NO: 1174 - protein, 23 aa, Homo sapiens
IITCSLIRDLYEWLHEGSAVSYF

SEQ ID NO: 1175 - protein, 45 aa, Homo sapiens
  SITE (8): Xaa equals any of the naturally occurring L-amino acids
AASSICLXQRLSHACLSTHGRYSETANGSLNQLWFLWSLAPLLLG

SEQ ID NO: 1176 - protein, 86 aa, Homo sapiens
  SITE (24): Xaa equals any of the naturally occurring L-amino acids
  SITE (35): Xaa equals any of the naturally occurring L-amino acids
  SITE (36): Xaa equals any of the naturally occurring L-amino acids
  SITE (45): Xaa equals any of the naturally occurring L-amino acids
  SITE (66): Xaa equals any of the naturally occurring L-amino acids
RPEDSLFCPKMENSTTTISREELXELQEAFNKIDXXNSGYVSDYXLQDLFKEASLPLPGYKVREIXEKILSVADSNKDGKINFEEF

SEQ ID NO: 1177 - protein, 166 aa, Homo sapiens
  SITE (157): Xaa equals any of the naturally occurring L-amino acids
  SITE (158): Xaa equals any of the naturally occurring L-amino acids
  SITE (163): Xaa equals any of the naturally occurring L-amino acids
ITISFFLCLRPPTFFSFPFSLWGPSPMLPCPIPFSPSRLLIPPFPSFPSNYQLWLGRHNLFDDENTAQFVHVSESFPHPGFNMSLLENHTRQADEDYSHDLMLLRLTEPADTITDAVKVGKLPTQEPEVGEHLVGFRLGQALNQKNFLISEDLQMVXXLQKSXLKE

SEQ ID NO: 1178 - protein, 79 aa, Homo sapiens
  SITE (2): Xaa equals any of the naturally occurring L-amino acids
CXAAGPSCALKAGKTASGAGEVVRCLSEQSVGHLALRRGPGARLPALLDEQQVNVLLYDMNGCYSRLKELVPTLPQNRK

SEQ ID NO: 1179 - protein, 51 aa, Homo sapiens
  SITE (2): Xaa equals any of the naturally occurring L-amino acids
  SITE (8): Xaa equals any of the naturally occurring L-amino acids
  SITE (9): Xaa equals any of the naturally occurring L-amino acids
  SITE (14): Xaa equals any of the naturally occurring L-amino acids
  SITE (19): Xaa equals any of the naturally occurring L-amino acids
  SITE (29): Xaa equals any of the naturally occurring L-amino acids
  SITE (41): Xaa equals any of the naturally occurring L-amino acids
  SITE (47): Xaa equals any of the naturally occurring L-amino acids
  SITE (50): Xaa equals any of the naturally occurring L-amino acids
AXVQLTLXXTQCPXGKSVXCHVKALHDSXPGCNCAPAQFPXLPHAAXPDXG

SEQ ID NO: 1180 - protein, 96 aa, Homo sapiens
  SITE (42): Xaa equals any of the naturally occurring L-amino acids
  SITE (50): Xaa equals any of the naturally occurring L-amino acids
  SITE (75): Xaa equals any of the naturally occurring L-amino acids
  SITE (81): Xaa equals any of the naturally occurring L-amino acids
  SITE (89): Xaa equals any of the naturally occurring L-amino acids
  SITE (95): Xaa equals any of the naturally occurring L-amino acids
ISRTPEGHVRGGGREAREDPEVQFNWYVDGVEVHNAKTKPRXEQFNSTYXWFSVLHRPAPGWLERQGSYKWQGFXTKGFPXFLGENLFXKAKGQXR

SEQ ID NO: 1181 - protein, 76 aa, Homo sapiens
  SITE (34): Xaa equals any of the naturally occurring L-amino acids
  SITE (46): Xaa equals any of the naturally occurring L-amino acids
GGYCSGGSCSNFYFYHMDVWGERTTVTVSSASTXGPSVFPLAPCSXNTSENTAALGCLVKDYFPETGDGVLELRGL

SEQ ID NO: 1182 - protein, 137 aa, Homo sapiens
  SITE (14): Xaa equals any of the naturally occurring L-amino acids
  SITE (22): Xaa equals any of the naturally occurring L-amino acids
  SITE (79): Xaa equals any of the naturally occurring L-amino acids
  SITE (90): Xaa equals any of the naturally occurring L-amino acids
  SITE (112): Xaa equals any of the naturally occurring L-amino acids
  SITE (125): Xaa equals any of the naturally occurring L-amino acids
  SITE (132): Xaa equals any of the naturally occurring L-amino acids
  SITE (136): Xaa equals any of the naturally occurring L-amino acids
DPYGTMEAPAQLLXLLLLWLPXTTGEILMTQSPATLSVSPGERVTLSCRAGQSVYSNLAWYQQKPGQAPRLLMYGSSTXATDVPVRFSGXGSGTEFTLTISSLQSDDSAVYXCQQYIMWPGTFGXGTKGEIXRTGXA

SEQ ID NO: 1183 - protein, 93 aa, Homo sapiens
  SITE (3): Xaa equals any of the naturally occurring L-amino acids
  SITE (4): Xaa equals any of the naturally occurring L-amino acids
  SITE (5): Xaa equals any of the naturally occurring L-amino acids
VRXXXFGSTAPSADAWVRTRGRTRGAEAAKMLGEALSKNPGYIKLRKIRAAQNISKTIATSQNRIYLTADNLVLNLQDESFTRGSDSLIKGKK

SEQ ID NO: 1184 - protein, 46 aa, Homo sapiens
  SITE (22): Xaa equals any of the naturally occurring L-amino acids
  SITE (32): Xaa equals any of the naturally occurring L-amino acids
  SITE (34): Xaa equals any of the naturally occurring L-amino acids
  SITE (40): Xaa equals any of the naturally occurring L-amino acids
  SITE (46): Xaa equals any of the naturally occurring L-amino acids
IDLMCKKMKHLWFFLLLVAVSXMRPVPGAAAXVXARTGEXFGDPVX

SEQ ID NO: 1185 - protein, 142 aa, Homo sapiens
  SITE (69): Xaa equals any of the naturally occurring L-amino acids
  SITE (119): Xaa equals any of the naturally occurring L-amino acids
  SITE (138): Xaa equals any of the naturally occurring L-amino acids
  SITE (141): Xaa equals any of the naturally occurring L-amino acids
  SITE (142): Xaa equals any of the naturally occurring L-amino acids
SALNTELTMEFGLSWVFLVVILKGVQCEVQLVESGGAVVQPGGSLRLSCEASGFTFDNYAMHWVRQAPXKGLEWVCLISRDGRKTYFADSMKGRFTISRDNSKNCLYLQVNSLRVEDTXLYYCAKDIPGSSVWTSGVXGHXX

SEQ ID NO: 1186 - protein, 68 aa, Homo sapiens
  SITE (61): Xaa equals any of the naturally occurring L-amino acids
  SITE (62): Xaa equals any of the naturally occurring L-amino acids
SWTPRPFHLVISTEHRGLTMELGLSWVFLVAILEGVQCEVQLVESGGGLVQAGGVPETLLXXLWLPPL

SEQ ID NO: 1187 - protein, 191 aa, Homo sapiens
  SITE (5): Xaa equals any of the naturally occurring L-amino acids
  SITE (121): Xaa equals any of the naturally occurring L-amino acids
  SITE (157): Xaa equals any of the naturally occurring L-amino acids
  SITE (171): Xaa equals any of the naturally occurring L-amino acids
  SITE (176): Xaa equals any of the naturally occurring L-amino acids
  SITE (180): Xaa equals any of the naturally occurring L-amino acids
  SITE (182): Xaa equals any of the naturally occurring L-amino acids
  SITE (191): Xaa equals any of the naturally occurring L-amino acids
GREIXRSFHLVISTEHRPPTMEFGPSWVFLVAILKGVHCEVQLVESGGGLVQPGRSLRLSCTTSGFTFGDYSMSWVRQAPGKGLEWVGFIRSKAHGGTTEYAASVKRQIHHLKEMIPQASXIWQMNSLKPRTQTLLLSRHDYRHTPGYWGQGTLVTXFSGFHQGPSSSPWXPCSRXTSEXQXPGLAGQGLX

SEQ ID NO: 1188 - protein, 121 aa, Homo sapiens
  SITE (13): Xaa equals any of the naturally occurring L-amino acids
  SITE (22): Xaa equals any of the naturally occurring L-amino acids
  SITE (35): Xaa equals any of the naturally occurring L-amino acids
  SITE (47): Xaa equals any of the naturally occurring L-amino acids
  SITE (53): Xaa equals any of the naturally occurring L-amino acids
  SITE (64): Xaa equals any of the naturally occurring L-amino acids
  SITE (67): Xaa equals any of the naturally occurring L-amino acids
  SITE (90): Xaa equals any of the naturally occurring L-amino acids
  SITE (94): Xaa equals any of the naturally occurring L-amino acids
  SITE (99): Xaa equals any of the naturally occurring L-amino acids
  SITE (101): Xaa equals any of the naturally occurring L-amino acids
  SITE (104): Xaa equals any of the naturally occurring L-amino acids
  SITE (108): Xaa equals any of the naturally occurring L-amino acids
  SITE (110): Xaa equals any of the naturally occurring L-amino acids
  SITE (111): Xaa equals any of the naturally occurring L-amino acids
  SITE (117): Xaa equals any of the naturally occurring L-amino acids
  SITE (119): Xaa equals any of the naturally occurring L-amino acids
VQCEVQLVESGGXLVQPGGSLXLSCAASGFTFSSXDMHWVRQVAGKXLEWVSXIDPAGNTNYPXSVXGRFIISRENDKSSSYLQNEWADXRGKXCVILXKXKLXFLVXGXXRSLGAXGXLG

SEQ ID NO: 1189 - protein, 125 aa, Homo sapiens
  SITE (8): Xaa equals any of the naturally occurring L-amino acids
  SITE (16): Xaa equals any of the naturally occurring L-amino acids
  SITE (49): Xaa equals any of the naturally occurring L-amino acids
  SITE (104): Xaa equals any of the naturally occurring L-amino acids
  SITE (123): Xaa equals any of the naturally occurring L-amino acids
GTSNAGNXNTKYSQKXQDRVTITRDTSTNTAYMDLSSLRSEDTAVYYCXRGFFGDRDYYYYYYMDVWGKGTTVTVSSASPTSPKVFPLSLCSTQPDGNVVIACXVQGFFPQEPLQCGPGAKGXRA

SEQ ID NO: 1190 - protein, 31 aa, Homo sapiens
NRTVAAPSVFIFPPSDEQLKSGTASVVLPAE

SEQ ID NO: 1191 - protein, 102 aa, Homo sapiens
  SITE (42): Xaa equals any of the naturally occurring L-amino acids
  SITE (44): Xaa equals any of the naturally occurring L-amino acids
  SITE (60): Xaa equals any of the naturally occurring L-amino acids
  SITE (87): Xaa equals any of the naturally occurring L-amino acids
  SITE (90): Xaa equals any of the naturally occurring L-amino acids
  SITE (94): Xaa equals any of the naturally occurring L-amino acids
  SITE (99): Xaa equals any of the naturally occurring L-amino acids
SNSGNTATLTISGTQAMDEADYYCQAWDSSAVVFGGGTRLTXLXQPKAAPSVTLFPPSSXELQANKATLVCLINDFYPGSRDSGLEXQIXTPFXAELGXTTT

SEQ ID NO: 1192 - protein, 160 aa, Homo sapiens
  SITE (123): Xaa equals any of the naturally occurring L-amino acids
  SITE (147): Xaa equals any of the naturally occurring L-amino acids
  SITE (150): Xaa equals any of the naturally occurring L-amino acids
  SITE (154): Xaa equals any of the naturally occurring L-amino acids
RPTRPQLWAQEAALRTISSMAWSPLLLTLLAHCTGSWAQSVLTQPPSVSGAPGQRVTISCTGSSSNIGAGYDVHWYQQLPGTAPKVLIYGNSNRPSGVPDRFSGSKSGTSASLAITGLQAEDXVDYYCQSYDSSLGGSVFGGRTKLXVLXQPKXAPSVTL

SEQ ID NO: 1193 - protein, 153 aa, Homo sapiens
  SITE (7): Xaa equals any of the naturally occurring L-amino acids
  SITE (24): Xaa equals any of the naturally occurring L-amino acids
  SITE (28): Xaa equals any of the naturally occurring L-amino acids
  SITE (29): Xaa equals any of the naturally occurring L-amino acids
  SITE (33): Xaa equals any of the naturally occurring L-amino acids
  SITE (37): Xaa equals any of the naturally occurring L-amino acids
  SITE (146): Xaa equals any of the naturally occurring L-amino acids
  SITE (149): Xaa equals any of the naturally occurring L-amino acids
  SITE (151): Xaa equals any of the naturally occurring L-amino acids
  SITE (152): Xaa equals any of the naturally occurring L-amino acids
  SITE (153): Xaa equals any of the naturally occurring L-amino acids
TGFRTIXTMAGFPLLLTLLTHCAXSWAXXVLTXPPSXSGTPGQRVTISCSGSSSNIGTNYVYWYQQLPGTAPEVLIYKNDQRPSGVPDRFSGSKSGTSASLAIGGLRSEDEADYYCASWDDSLSGPVFGGGTKLTVLGQPKAAPSXTLXPXXX

SEQ ID NO: 1194 - protein, 114 aa, Homo sapiens
  SITE (108): Xaa equals any of the naturally occurring L-amino acids
GGRALGISPWPGPLSCSPSSLSAQRKRGQAPVVVIYEDNKRPSGIPERFSGSTSGTLATVIISGAQVDDDTDFYCQSTHSSNNGRSVCLRNWDQGHRPWSAQGQPQCXSVPGLL

SEQ ID NO: 1195 - protein, 97 aa, Homo sapiens
  SITE (4): Xaa equals any of the naturally occurring L-amino acids
  SITE (34): Xaa equals any of the naturally occurring L-amino acids
  SITE (41): Xaa equals any of the naturally occurring L-amino acids
  SITE (45): Xaa equals any of the naturally occurring L-amino acids
  SITE (48): Xaa equals any of the naturally occurring L-amino acids
QNSXCLTMAWIPLLLPLLTLCTDSEASHELRQPXSVSVSPXQTAXITXSGDALPEQSIFWYQQKPGQAPVLVIYKVHERPSDALNDSLAPGHRQQSR

SEQ ID NO: 1196 - protein, 192 aa, Homo sapiens
  SITE (2): Xaa equals any of the naturally occurring L-amino acids
  SITE (14): Xaa equals any of the naturally occurring L-amino acids
  SITE (21): Xaa equals any of the naturally occurring L-amino acids
  SITE (32): Xaa equals any of the naturally occurring L-amino acids
  SITE (33): Xaa equals any of the naturally occurring L-amino acids
  SITE (36): Xaa equals any of the naturally occurring L-amino acids
  SITE (38): Xaa equals any of the naturally occurring L-amino acids
  SITE (50): Xaa equals any of the naturally occurring L-amino acids
  SITE (52): Xaa equals any of the naturally occurring L-amino acids
  SITE (57): Xaa equals any of the naturally occurring L-amino acids
  SITE (60): Xaa equals any of the naturally occurring L-amino acids
  SITE (61): Xaa equals any of the naturally occurring L-amino acids
  SITE (62): Xaa equals any of the naturally occurring L-amino acids
  SITE (63): Xaa equals any of the naturally occurring L-amino acids
  SITE (66): Xaa equals any of the naturally occurring L-amino acids
  SITE (70): Xaa equals any of the naturally occurring L-amino acids
  SITE (79): Xaa equals any of the naturally occurring L-amino acids
  SITE (80): Xaa equals any of the naturally occurring L-amino acids
  SITE (84): Xaa equals any of the naturally occurring L-amino acids
  SITE (86): Xaa equals any of the naturally occurring L-amino acids
  SITE (92): Xaa equals any of the naturally occurring L-amino acids
  SITE (105): Xaa equals any of the naturally occurring L-amino acids
  SITE (108): Xaa equals any of the naturally occurring L-amino acids
  SITE (125): Xaa equals any of the naturally occurring L-amino acids
  SITE (131): Xaa equals any of the naturally occurring L-amino acids
  SITE (132): Xaa equals any of the naturally occurring L-amino acids
  SITE (136): Xaa equals any of the naturally occurring L-amino acids
  SITE (146): Xaa equals any of the naturally occurring L-amino acids
  SITE (158): Xaa equals any of the naturally occurring L-amino acids
  SITE (164): Xaa equals any of the naturally occurring L-amino acids
  SITE (165): Xaa equals any of the naturally occurring L-amino acids
  SITE (177): Xaa equals any of the naturally occurring L-amino acids
  SITE (178): Xaa equals any of the naturally occurring L-amino acids
  SITE (187): Xaa equals any of the naturally occurring L-amino acids
IXLTKGNKRWSSTXVAAALEXLDPPGCPGSAXXDNXGXVGSGPPNPDLSXTXLDQYXAMXXXXHGXNMEXALGMLFWHXXNIQXSXADLPNXTPFPDKWTVEDKXLFXQAFTFHGKTFHTIQPMXPHKSIXXLVKXYYSWKKDEDXNYCDGSPCPGNXTGREEXXDELEQANGTIPXXLKLDPNQEXQREVP

SEQ ID NO: 1197 - protein, 43 aa, Homo sapiens
  SITE (10): Xaa equals any of the naturally occurring L-amino acids
  SITE (27): Xaa equals any of the naturally occurring L-amino acids
  SITE (28): Xaa equals any of the naturally occurring L-amino acids
  SITE (29): Xaa equals any of the naturally occurring L-amino acids
  SITE (40): Xaa equals any of the naturally occurring L-amino acids
  SITE (42): Xaa equals any of the naturally occurring L-amino acids
EQNLDRQVLXTQCIRLEARYYSLSLTXXXLSHIVAELRNXKXK

SEQ ID NO: 1198 - protein, 98 aa, Homo sapiens
  SITE (88): Xaa equals any of the naturally occurring L-amino acids
VSPASTNCQSQENFEAFMKAIGLPEELIQKGKDIKGVSEIVQNGKHFKFTITAGSKVIQNEFTVGEECELETMTGEKVKTVVQLEGDXKLVTTFKNIK

SEQ ID NO: 1199 - protein, 184 aa, Homo sapiens
  SITE (26): Xaa equals any of the naturally occurring L-amino acids
  SITE (31): Xaa equals any of the naturally occurring L-amino acids
  SITE (35): Xaa equals any of the naturally occurring L-amino acids
  SITE (37): Xaa equals any of the naturally occurring L-amino acids
  SITE (38): Xaa equals any of the naturally occurring L-amino acids
  SITE (40): Xaa equals any of the naturally occurring L-amino acids
  SITE (41): Xaa equals any of the naturally occurring L-amino acids
  SITE (43): Xaa equals any of the naturally occurring L-amino acids
  SITE (44): Xaa equals any of the naturally occurring L-amino acids
  SITE (45): Xaa equals any of the naturally occurring L-amino acids
  SITE (46): Xaa equals any of the naturally occurring L-amino acids
  SITE (52): Xaa equals any of the naturally occurring L-amino acids
  SITE (54): Xaa equals any of the naturally occurring L-amino acids
  SITE (65): Xaa equals any of the naturally occurring L-amino acids
  SITE (77): Xaa equals any of the naturally occurring L-amino acids
  SITE (78): Xaa equals any of the naturally occurring L-amino acids
  SITE (80): Xaa equals any of the naturally occurring L-amino acids
  SITE (83): Xaa equals any of the naturally occurring L-amino acids
  SITE (87): Xaa equals any of the naturally occurring L-amino acids
  SITE (88): Xaa equals any of the naturally occurring L-amino acids
  SITE (95): Xaa equals any of the naturally occurring L-amino acids
  SITE (97): Xaa equals any of the naturally occurring L-amino acids
  SITE (100): Xaa equals any of the naturally occurring L-amino acids
  SITE (108): Xaa equals any of the naturally occurring L-amino acids
  SITE (116): Xaa equals any of the naturally occurring L-amino acids
  SITE (123): Xaa equals any of the naturally occurring L-amino acids
  SITE (129): Xaa equals any of the naturally occurring L-amino acids
  SITE (131): Xaa equals any of the naturally occurring L-amino acids
  SITE (133): Xaa equals any of the naturally occurring L-amino acids
  SITE (136): Xaa equals any of the naturally occurring L-amino acids
  SITE (139): Xaa equals any of the naturally occurring L-amino acids
  SITE (162): Xaa equals any of the naturally occurring L-amino acids
  SITE (178): Xaa equals any of the naturally occurring L-amino acids
KKKKKKKKKKKKKKKKKKKKKKKKKXGGRFXGSKXTXXCXXRXXXXIGSPKXNXLAVVLQRRDWXNPGVTQLNRLAXXPXFAXWRNXXKARTDRXSXQLXSLNGKWDXPCSGALSXAGVGVTXSVTVTXAXAXAPXPFXFFPSFFATFAGFPRKALNGGLPXGFRFRALRDLDPKKLXLGGWFT

SEQ ID NO: 1200 - protein, 83 aa, Homo sapiens
GPEMQVKLLQSLGLKSTLITDGSTPINLFNTAFGLLGMGPEGPAPGQKGWHWAQPWKGDIPPVLLKPLKLLENTTLCLFCAYS

SEQ ID NO: 1201 - protein, 75 aa, Homo sapiens
  SITE (74): Xaa equals any of the naturally occurring L-amino acids
LLFLGPVGLIMYLGGVFFINRQRSSTAMTVMADLGERMVRENLKVWIYPEGTRNDNGDLLPFKKGAFYLAVQAXV

SEQ ID NO: 1202 - protein, 179 aa, Homo sapiens
  SITE (44): Xaa equals any of the naturally occurring L-amino acids
  SITE (108): Xaa equals any of the naturally occurring L-amino acids
  SITE (125): Xaa equals any of the naturally occurring L-amino acids
  SITE (131): Xaa equals any of the naturally occurring L-amino acids
  SITE (132): Xaa equals any of the naturally occurring L-amino acids
  SITE (138): Xaa equals any of the naturally occurring L-amino acids
  SITE (144): Xaa equals any of the naturally occurring L-amino acids
  SITE (145): Xaa equals any of the naturally occurring L-amino acids
  SITE (147): Xaa equals any of the naturally occurring L-amino acids
  SITE (153): Xaa equals any of the naturally occurring L-amino acids
  SITE (157): Xaa equals any of the naturally occurring L-amino acids
  SITE (158): Xaa equals any of the naturally occurring L-amino acids
  SITE (161): Xaa equals any of the naturally occurring L-amino acids
  SITE (166): Xaa equals any of the naturally occurring L-amino acids
  SITE (176): Xaa equals any of the naturally occurring L-amino acids
KQRSEDSMYTAIPQSGSPFPGSVQDPGLHVWRVEKLKPVPVAQXNQGIFFSGDSYLVLHNGPEEVSHLHLNTLLGERPVQHREVRGNESDLFMSYFPRGFKYQEGGLXSAFHKTSTGAPVAIKKXYQVKGXXKSVQRXGMNWEXXNXGCLPGXGKNXXGLXNQIWXKRGDCLDRDXQGS

SEQ ID NO: 1203 - protein, 145 aa, Homo sapiens
  SITE (135): Xaa equals any of the naturally occurring L-amino acids
  SITE (140): Xaa equals any of the naturally occurring L-amino acids
LFLDSVGGGAWPFLVGGAICLVNSDNERDSGMLTSYATPERSASPNFLEGQVAFSHPRLSNNRSVMPLDVRGCTRATLTGSACAYPTPAGAGNPLNPIRDGDRGLQLFPMNEEFPVSAGHKLALIKSLPLQPFWXFGPLXLFHLS

SEQ ID NO: 1204 - protein, 72 aa, Homo sapiens
  SITE (12): Xaa equals any of the naturally occurring L-amino acids
  SITE (19): Xaa equals any of the naturally occurring L-amino acids
  SITE (20): Xaa equals any of the naturally occurring L-amino acids
  SITE (28): Xaa equals any of the naturally occurring L-amino acids
  SITE (35): Xaa equals any of the naturally occurring L-amino acids
  SITE (36): Xaa equals any of the naturally occurring L-amino acids
  SITE (48): Xaa equals any of the naturally occurring L-amino acids
  SITE (53): Xaa equals any of the naturally occurring L-amino acids
  SITE (56): Xaa equals any of the naturally occurring L-amino acids
  SITE (57): Xaa equals any of the naturally occurring L-amino acids
  SITE (60): Xaa equals any of the naturally occurring L-amino acids
PRPAGNSSRVHXEGTTVLXXQFGLNASXSRFFLQXXQLITILPVRQRXLPLKXANXXLTXPAATVRQFLQVP

SEQ ID NO: 1205 - protein, 159 aa, Homo sapiens
TPLGVPVIQPYRLDSKVKQIGGGIQSITYTHNGDISRKPNTRKQKNGFPPNFIHSLDSSHMMLTALHCYRKGLTFVSVHDCYWTHAADVSVMNQVCREQFVRLHSEPILQDLSRFLVKRFCSEPQKILEASQLKETLQAVPKPGAFDLEQVKRSTYFFS

SEQ ID NO: 1206 - protein, 109 aa, Homo sapiens
  SITE (9): Xaa equals any of the naturally occurring L-amino acids
  SITE (41): Xaa equals any of the naturally occurring L-amino acids
  SITE (44): Xaa equals any of the naturally occurring L-amino acids
  SITE (47): Xaa equals any of the naturally occurring L-amino acids
  SITE (75): Xaa equals any of the naturally occurring L-amino acids
  SITE (82): Xaa equals any of the naturally occurring L-amino acids
  SITE (89): Xaa equals any of the naturally occurring L-amino acids
  SITE (97): Xaa equals any of the naturally occurring L-amino acids
  SITE (105): Xaa equals any of the naturally occurring L-amino acids
QMYGTNKMXPYRDSKLTHLFKNYFDGEGKVRMIVYVNPKAXDYXENXQVMRFAEVTQEVEVARPVDKVICGLTPXRRYRNQXRGPVGNXPLGTDVVXQSFPPLPXMRNF

SEQ ID NO: 1207 - protein, 84 aa, Homo sapiens
  SITE (2): Xaa equals any of the naturally occurring L-amino acids
  SITE (68): Xaa equals any of the naturally occurring L-amino acids
NXKLSEQELQFRRLSQEQVDNFTLDINTAYARLRGIEQAVQSHAVAEEEARKAHQLWLSVEALKYSMXDLHLAETPTIPLGSGS

SEQ ID NO: 1208 - protein, 57 aa, Homo sapiens
  SITE (37): Xaa equals any of the naturally occurring L-amino acids
  SITE (46): Xaa equals any of the naturally occurring L-amino acids
  SITE (52): Xaa equals any of the naturally occurring L-amino acids
  SITE (53): Xaa equals any of the naturally occurring L-amino acids
PCSTVPVTTEVSYAGCTKTVLMNHCSGSCGTFVMYSXQAQALDHSXLLLQRXXNQPA

SEQ ID NO: 1209 - protein, 84 aa, Homo sapiens
  SITE (2): Xaa equals any of the naturally occurring L-amino acids
  SITE (26): Xaa equals any of the naturally occurring L-amino acids
  SITE (59): Xaa equals any of the naturally occurring L-amino acids
  SITE (64): Xaa equals any of the naturally occurring L-amino acids
  SITE (72): Xaa equals any of the naturally occurring L-amino acids
AXDQAGEVDHTLLGQCTGGGYFMQFXTSSGSAEEAALLESRILYPKRKQQCLQFFYKMXGEVLXDRLRCLGXGGDDSTGNVRNW

SEQ ID NO: 1210 - protein, 129 aa, Homo sapiens
  SITE (106): Xaa equals any of the naturally occurring L-amino acids
  SITE (124): Xaa equals any of the naturally occurring L-amino acids
  SITE (128): Xaa equals any of the naturally occurring L-amino acids
  SITE (129): Xaa equals any of the naturally occurring L-amino acids
LLNDAVTVVLYHLFEEFANYEHVGIVDIFLGFLSFFVVALGGVLVGVVYGVIAAFTSRFTSHIRVIEPLFVFLYSYMAYLSAELFHLSGIMALIASGVVMRPYVGXQHFHKFPQQHQIISWKMXEQRXX

SEQ ID NO: 1211 - protein, 43 aa, Homo sapiens
  SITE (6): Xaa equals any of the naturally occurring L-amino acids
  SITE (17): Xaa equals any of the naturally occurring L-amino acids
LHAFCXINNIKPSWTRXNTLMFIHLSPILLLSLNPDIITGFSS

SEQ ID NO: 1212 - protein, 29 aa, Homo sapiens
  SITE (17): Xaa equals any of the naturally occurring L-amino acids
  SITE (20): Xaa equals any of the naturally occurring L-amino acids
  SITE (27): Xaa equals any of the naturally occurring L-amino acids
QGFKVERMHITDMKLAXLPXLEALGVXVN

SEQ ID NO: 1213 - protein, 137 aa, Homo sapiens
  SITE (29): Xaa equals any of the naturally occurring L-amino acids
  SITE (70): Xaa equals any of the naturally occurring L-amino acids
  SITE (77): Xaa equals any of the naturally occurring L-amino acids
  SITE (82): Xaa equals any of the naturally occurring L-amino acids
  SITE (92): Xaa equals any of the naturally occurring L-amino acids
  SITE (114): Xaa equals any of the naturally occurring L-amino acids
  SITE (116): Xaa equals any of the naturally occurring L-amino acids
  SITE (135): Xaa equals any of the naturally occurring L-amino acids
  SITE (137): Xaa equals any of the naturally occurring L-amino acids
AKVHPNSVHICAVVVEYETKAGRINKGVXTNWLRAKEPAGENGGRALVPMFVRKSQFRLPFKATTPVIMXGPGTGVXPFIGXIQERAWLRQXGKEVGETLLNYGCRRSDEDYLXRXELAQFHRDGALTQLNVAFXRX

SEQ ID NO: 1214 - protein, 207 aa, Homo sapiens
  SITE (3): Xaa equals any of the naturally occurring L-amino acids
  SITE (25): Xaa equals any of the naturally occurring L-amino acids
  SITE (54): Xaa equals any of the naturally occurring L-amino acids
  SITE (78): Xaa equals any of the naturally occurring L-amino acids
  SITE (84): Xaa equals any of the naturally occurring L-amino acids
  SITE (97): Xaa equals any of the naturally occurring L-amino acids
  SITE (122): Xaa equals any of the naturally occurring L-amino acids
  SITE (136): Xaa equals any of the naturally occurring L-amino acids
  SITE (145): Xaa equals any of the naturally occurring L-amino acids
  SITE (150): Xaa equals any of the naturally occurring L-amino acids
  SITE (158): Xaa equals any of the naturally occurring L-amino acids
  SITE (165): Xaa equals any of the naturally occurring L-amino acids
  SITE (168): Xaa equals any of the naturally occurring L-amino acids
  SITE (170): Xaa equals any of the naturally occurring L-amino acids
  SITE (180): Xaa equals any of the naturally occurring L-amino acids
  SITE (187): Xaa equals any of the naturally occurring L-amino acids
  SITE (196): Xaa equals any of the naturally occurring L-amino acids
  SITE (207): Xaa equals any of the naturally occurring L-amino acids
ASXHHSACFLGPEIMPLGLLWLGLXLLGALHAQAQDSTSDLIPAPPLSKVPLQXNFHDNQFHGKWYVVRLARNAILRXHKDPQXMYATIYELKETRXTMSLRLFKKKKCDYLDQEFWSKVAXRRIPPWGPLKLPWXNQFPPSNCXHQLQXPSFGFLPXNFSKQGXLPXPXFRKNKELIPXLKEKFSXLPFLGPPKXKFVFPFPTNIX

SEQ ID NO: 1215 - protein, 69 aa, Homo sapiens
  SITE (15): Xaa equals any of the naturally occurring L-amino acids
  SITE (19): Xaa equals any of the naturally occurring L-amino acids
  SITE (25): Xaa equals any of the naturally occurring L-amino acids
  SITE (31): Xaa equals any of the naturally occurring L-amino acids
  SITE (40): Xaa equals any of the naturally occurring L-amino acids
  SITE (43): Xaa equals any of the naturally occurring L-amino acids
  SITE (59): Xaa equals any of the naturally occurring L-amino acids
  SITE (65): Xaa equals any of the naturally occurring L-amino acids
  SITE (69): Xaa equals any of the naturally occurring L-amino acids
GSHTARRLGRLRGSXARLXGPRRAXGGKMAXGGGDLSTRXLNXCISPVANEMNHLPAHXHDLQRXFTEX

SEQ ID NO: 1216 - protein, 58 aa, Homo sapiens
  SITE (42): Xaa equals any of the naturally occurring L-amino acids
  SITE (53): Xaa equals any of the naturally occurring L-amino acids
  SITE (56): Xaa equals any of the naturally occurring L-amino acids
LNPLGIKYIVARPVYSTNAFEENHKKTGRHHKTFLDHLKVCXNCSPQKARELXSLXFP

SEQ ID NO: 1217 - protein, 144 aa, Homo sapiens
  SITE (126): Xaa equals any of the naturally occurring L-amino acids
AGLQMGRSRSRSPRRERRRSRSTSRERERRRRERSRSRERDRRRSRSRSPHRRRSRSPRRHRSTSPSPSRLKERRDEEKKETKETKSKERQITEEDLEGKTEEEIEMMKLMGFASFDSTKGKKVDXSVNAYAINVSQKRKYRYA

SEQ ID NO: 1218 - protein, 70 aa, Homo sapiens
  SITE (2): Xaa equals any of the naturally occurring L-amino acids
QXLCQAGDDSNSNKKNADLQVLKPEPELVYEDLRGSVTFHCALGPEVANVAKILSGREWGKDAVSSLQIC

SEQ ID NO: 1219 - protein, 104 aa, Homo sapiens
  SITE (7): Xaa equals any of the naturally occurring L-amino acids
  SITE (8): Xaa equals any of the naturally occurring L-amino acids
  SITE (102): Xaa equals any of the naturally occurring L-amino acids
STHASAXXSLVLRIATDDSKAVCRLSVKFGATLKISRLLLERARELNIDIIGVSFHVGSGCTDPGDLRASHLRCPLCLRHGELRLVSTCICLISVVGFPGIXRM

SEQ ID NO: 1220 - protein, 89 aa, Homo sapiens
  SITE (4): Xaa equals any of the naturally occurring L-amino acids
  SITE (7): Xaa equals any of the naturally occurring L-amino acids
  SITE (15): Xaa equals any of the naturally occurring L-amino acids
  SITE (20): Xaa equals any of the naturally occurring L-amino acids
  SITE (45): Xaa equals any of the naturally occurring L-amino acids
  SITE (47): Xaa equals any of the naturally occurring L-amino acids
  SITE (53): Xaa equals any of the naturally occurring L-amino acids
  SITE (69): Xaa equals any of the naturally occurring L-amino acids
  SITE (87): Xaa equals any of the naturally occurring L-amino acids
  SITE (88): Xaa equals any of the naturally occurring L-amino acids
GTRXCPXRVRVAMGXIEWAXWANEQALASGLILITGGIVATAGRXTXWYFGAXSIVAGVFVCLLEYPRXKRKKGSTMVRWGQKYMTXXV

SEQ ID NO: 1221 - protein, 141 aa, Homo sapiens
DTFIRHIALLGFEKRFVPSQHYVHVPGEMAGPVGEGGLPALHRDLRVPSPKWFDGQRAAENHQGTLTEYCGTLMSLPTKISRCPHLLDFFKVRPDDLKLPTDNQTKKPETYLMPKDGKSTATDITGPIILQTYRAIANYEK

SEQ ID NO: 1222 - protein, 29 aa, Homo sapiens
  SITE (9): Xaa equals any of the naturally occurring L-amino acids
  SITE (24): Xaa equals any of the naturally occurring L-amino acids
RCPVTVCGXVHGQFHDLMELFRIXGKSPD

SEQ ID NO: 1223 - protein, 43 aa, Homo sapiens
  SITE (2): Xaa equals any of the naturally occurring L-amino acids
  SITE (3): Xaa equals any of the naturally occurring L-amino acids
  SITE (6): Xaa equals any of the naturally occurring L-amino acids
  SITE (8): Xaa equals any of the naturally occurring L-amino acids
  SITE (10): Xaa equals any of the naturally occurring L-amino acids
  SITE (19): Xaa equals any of the naturally occurring L-amino acids
  SITE (24): Xaa equals any of the naturally occurring L-amino acids
  SITE (37): Xaa equals any of the naturally occurring L-amino acids
  SITE (40): Xaa equals any of the naturally occurring L-amino acids
  SITE (41): Xaa equals any of the naturally occurring L-amino acids
LXXQIXYXTXPTSLPRTSXCLHAXTSWKQSLLGCLNXKLXXAT

SEQ ID NO: 1224 - protein, 94 aa, Homo sapiens
ADAWGKTFARYLSFRRDNNELLLFILKQLVAEQVTYQRNRFGAQQDTIEVPEKDLVDKARQINIHNLSAFYDSELFRMNKFSHDLKRKMILQQF

SEQ ID NO: 1225 - protein, 71 aa, Homo sapiens
  SITE (10): Xaa equals any of the naturally occurring L-amino acids
GRPTRPPTLXLAWTSGTNCTRFGIAAKYQLDPTASISAKVNNSSLIGVGYTQTLRPGVKLTLSGSGRWEEH

SEQ ID NO: 1226 - protein, 154 aa, Homo sapiens
  SITE (105): Xaa equals any of the naturally occurring L-amino acids
  SITE (131): Xaa equals any of the naturally occurring L-amino acids
  SITE (135): Xaa equals any of the naturally occurring L-amino acids
  SITE (142): Xaa equals any of the naturally occurring L-amino acids
  SITE (145): Xaa equals any of the naturally occurring L-amino acids
  SITE (151): Xaa equals any of the naturally occurring L-amino acids
GKMVLQTQVFISLLLWISGAYGDIVMTQSPDSLAVSLGERATINCKSSQSVLYSSNNKNYLTWYQQKPGQPPKLLLYWASTRESGVPDRFSGSGSGTDFTLTISXLQAEDVADYYCQQYYTTPWTFGHWTXVEIXRNCGCTXCLXFPPSGXQLK

SEQ ID NO: 1227 - protein, 101 aa, Homo sapiens
  SITE (32): Xaa equals any of the naturally occurring L-amino acids
WLILAVISVYDLVAVLCPKGPLRMLVETAQEXNETLFPALIYSSTMVWLVNMAEGDPEAQRRVSKNSKYNAESTERSHKTLLQRMMMAGSVRNGKPRRTVI

SEQ ID NO: 1228 - protein, 75 aa, Homo sapiens
  SITE (22): Xaa equals any of the naturally occurring L-amino acids
  SITE (32): Xaa equals any of the naturally occurring L-amino acids
  SITE (33): Xaa equals any of the naturally occurring L-amino acids
  SITE (39): Xaa equals any of the naturally occurring L-amino acids
  SITE (46): Xaa equals any of the naturally occurring L-amino acids
  SITE (57): Xaa equals any of the naturally occurring L-amino acids
  SITE (69): Xaa equals any of the naturally occurring L-amino acids
  SITE (72): Xaa equals any of the naturally occurring L-amino acids
LISGKDCAVIVTQKKVPDKLLXSSTVTHLFKXXGNIGCXKTGMSAXSRSQVQRARYXAANLEYKYGYEXPVXMPV

SEQ ID NO: 1229 - protein, 46 aa, Homo sapiens
  SITE (6): Xaa equals any of the naturally occurring L-amino acids
NTLILXPSKNHLKAAGHLYIVMEYCDGRDLMQKIKQQKRKSYFLKT

SEQ ID NO: 1230 - protein, 136 aa, Homo sapiens
  SITE (51): Xaa equals any of the naturally occurring L-amino acids
  SITE (64): Xaa equals any of the naturally occurring L-amino acids
  SITE (73): Xaa equals any of the naturally occurring L-amino acids
  SITE (120): Xaa equals any of the naturally occurring L-amino acids
  SITE (123): Xaa equals any of the naturally occurring L-amino acids
  SITE (129): Xaa equals any of the naturally occurring L-amino acids
  SITE (134): Xaa equals any of the naturally occurring L-amino acids
KTIRCVCTWRLHLLASTYACSQNTNKTCEECLKNVSCLWCNTNKLVLDYQXQSLATGFPLLINXLHLGNFVGXNLEALNHHMFGSPGNPPPGALASAACLLAARRKKEPETRTGIKEKRXCVXPERKSXIPAGXTE

SEQ ID NO: 1231 - protein, 105 aa, Homo sapiens
  SITE (3): Xaa equals any of the naturally occurring L-amino acids
  SITE (84): Xaa equals any of the naturally occurring L-amino acids
  SITE (93): Xaa equals any of the naturally occurring L-amino acids
  SITE (102): Xaa equals any of the naturally occurring L-amino acids
LPXGAGGMSKGLPARQDMEKERETLQAWKERVGQELDRVVAFWMEHSHDQEHGGFFTCLGREGRVYDDLKYVWLQGRQVWMYCXPVPHFRALXPCSASGRSXSRW

SEQ ID NO: 1232 - protein, 99 aa, Homo sapiens
  SITE (14): Xaa equals any of the naturally occurring L-amino acids
  SITE (95): Xaa equals any of the naturally occurring L-amino acids
NSARAEVTDEYKNXVKNRSVYIKGFPTDATLDDIKEWLEDKGQVLNIQMRRTLHKAFKGSIFVVFDSIESAKKFVEAPGQKYKEPDLLILFKAGXFAKK

SEQ ID NO: 1233 - protein, 80 aa, Homo sapiens
PFGTGPEFPGLPSSSFLRHRGVFLTPLLAMSSHKTFRIKRFLAKKQKQNRPIPQWIRMKTGNKIRYNSKRRHWRRTKLGL

SEQ ID NO: 1234 - protein, 83 aa, Homo sapiens
  SITE (4): Xaa equals any of the naturally occurring L-amino acids
VTLXKVRLQVPVRNSRVDPRVRRPTRPPTRPPTRPPTRPLCRKMGVPYCIIKGKARLGRLVHRKTCTTVAFTQVNSERQRRFG

SEQ ID NO: 1235 - protein, 161 aa, Homo sapiens
REQKLELHRGAAALELVDPPGCRNSARGAATMVRMNVLADALKSINNAEKRGKRQVLIRPCSKVIVRFLTVMMKHGYIGEFEIIDDHRAGKIVVNLTGRLNKCGVISPRFDVQLKDLEKWQNNLLPSRQFGFIVLTTSAGIMDHEEARRKHTGGKILGFFF

SEQ ID NO: 1236 - protein, 152 aa, Homo sapiens
  SITE (2): Xaa equals any of the naturally occurring L-amino acids
  SITE (43): Xaa equals any of the naturally occurring L-amino acids
  SITE (106): Xaa equals any of the naturally occurring L-amino acids
  SITE (138): Xaa equals any of the naturally occurring L-amino acids
  SITE (150): Xaa equals any of the naturally occurring L-amino acids
  SITE (151): Xaa equals any of the naturally occurring L-amino acids
  SITE (152): Xaa equals any of the naturally occurring L-amino acids
LXRALFKRNPANRLGSGPDGAEEIKRHVFYSTIDWNKLYRREXTPPFKPAVAQPDDTFYFDTEFTSRTPKDSPGIPPSAGAHQLFRGFSFVATGLMEDDGKPRAPXAPLHSVVQQLHGKNLVFSDGYVVKETIGVGSXSECKRCVHKGPXXX

SEQ ID NO: 1237 - protein, 73 aa, Homo sapiens
  SITE (6): Xaa equals any of the naturally occurring L-amino acids
  SITE (14): Xaa equals any of the naturally occurring L-amino acids
  SITE (20): Xaa equals any of the naturally occurring L-amino acids
  SITE (23): Xaa equals any of the naturally occurring L-amino acids
  SITE (24): Xaa equals any of the naturally occurring L-amino acids
  SITE (43): Xaa equals any of the naturally occurring L-amino acids
  SITE (53): Xaa equals any of the naturally occurring L-amino acids
  SITE (57): Xaa equals any of the naturally occurring L-amino acids
  SITE (71): Xaa equals any of the naturally occurring L-amino acids
RDTSHXVAGALRPXVQATVXATXXQPVLDLKRPFLSRESLSGXACDRLVVDSXGAQXPCFFLLIPTQTSRXLI

SEQ ID NO: 1238 - protein, 41 aa, Homo sapiens
MGFSLIPSSFSHLADNTTSLTDKHLDPIRENLGKHWEKLCP

SEQ ID NO: 1239 - protein, 42 aa, Homo sapiens
  SITE (7): Xaa equals any of the naturally occurring L-amino acids
  SITE (18): Xaa equals any of the naturally occurring L-amino acids
  SITE (29): Xaa equals any of the naturally occurring L-amino acids
  SITE (39): Xaa equals any of the naturally occurring L-amino acids
  SITE (41): Xaa equals any of the naturally occurring L-amino acids
HDSCKKXTKHYEMLANRXAANGHCIDIYXCAPDQTGLLXLXC

SEQ ID NO: 1240 - protein, 106 aa, Homo sapiens
  SITE (13): Xaa equals any of the naturally occurring L-amino acids
  SITE (65): Xaa equals any of the naturally occurring L-amino acids
  SITE (98): Xaa equals any of the naturally occurring L-amino acids
LESLQENHFQEDXQFLGAVMPRLGIGMDTCVIPLKHGGLSLVQTTDYIYPIVDDPYMMTPAVAEXRPVPCPHLALGIKQLGRKQESPLLLLQLNTCWXDNMCQCPQ

SEQ ID NO: 1241 - protein, 77 aa, Homo sapiens [sequence omitted]

SEQ ID NO: 1242 - protein, 110 aa, Homo sapiens
  SITE (103): Xaa equals any of the naturally occurring L-amino acids
RLAITGLTMERKVLALQARKKRTKAKKDKAQRKSETQHRGSAPHSESDLPEQEEEILGSDDDEQEDPNDYCKGGYHLVKIGDLFNGRYHVIRKLGWGHFSTVXVIMGYSS

SEQ ID NO: 1243 - protein, 101 aa, Homo sapiens
  SITE (1): Xaa equals any of the naturally occurring L-amino acids
  SITE (4): Xaa equals any of the naturally occurring L-amino acids
  SITE (7): Xaa equals any of the naturally occurring L-amino acids
  SITE (11): Xaa equals any of the naturally occurring L-amino acids
  SITE (34): Xaa equals any of the naturally occurring L-amino acids
  SITE (38): Xaa equals any of the naturally occurring L-amino acids
  SITE (50): Xaa equals any of the naturally occurring L-amino acids
  SITE (63): Xaa equals any of the naturally occurring L-amino acids
  SITE (74): Xaa equals any of the naturally occurring L-amino acids
  SITE (86): Xaa equals any of the naturally occurring L-amino acids
  SITE (88): Xaa equals any of the naturally occurring L-amino acids
  SITE (93): Xaa equals any of the naturally occurring L-amino acids
  SITE (94): Xaa equals any of the naturally occurring L-amino acids
XTIXEEXVPLXVPVRNSRVDPRVRYDNLITPAMXGAGXLQGNVDSCQGDXGGPLVTSKNNIWXLIGDTSWGSGXAKAYRPGVYGNXMXFTDWXXRQMRADG

SEQ ID NO: 1244 - protein, 80 aa, Homo sapiens
GVYTMSKAHPPELKKFMDKKLSLKLNGGRHVQGILRGFDPFMNLVIDECVEMATSGQQNNIGMVVIRGNSIIMLEALERV

SEQ ID NO: 1245 - protein, 129 aa, Homo sapiens
  SITE (128): Xaa equals any of the naturally occurring L-amino acids
FIMDNLSSEEIQQRAHQITDESLESTRRILGLAIESQDAGIKTITMLDEQKEQLNRIEEGLDQINKDMRETEKTLTELNKCCGLCVCPCNRTKNFESGKAYKTTWGDGGENSPCNVVSKQPGPVTNGXL

SEQ ID NO: 1246 - protein, 136 aa, Homo sapiens
  SITE (134): Xaa equals any of the naturally occurring L-amino acids
STEGYGCEKTTEGYGCEKTTEGGSMAYPGHPGAGGGYYPGGYGGAPGGPAFPGQTQDPLYGYFAAVAGQDGQIDADELQRCLTQSGIAGGYKPFNLETCRLMVSMLDRDMSGTMGFNEFKELWAVLNGWRQHFXNF

SEQ ID NO: 1247 - protein, 87 aa, Homo sapiens
  SITE (6): Xaa equals any of the naturally occurring L-amino acids
  SITE (23): Xaa equals any of the naturally occurring L-amino acids
  SITE (34): Xaa equals any of the naturally occurring L-amino acids
  SITE (43): Xaa equals any of the naturally occurring L-amino acids
  SITE (50): Xaa equals any of the naturally occurring L-amino acids
  SITE (61): Xaa equals any of the naturally occurring L-amino acids
  SITE (62): Xaa equals any of the naturally occurring L-amino acids
  SITE (78): Xaa equals any of the naturally occurring L-amino acids
  SITE (83): Xaa equals any of the naturally occurring L-amino acids
HSGGPXRPAVADVGLGGRARRRXPTGASTWGTSXRRAREGTWXDLFYKYXRIREIELKNRXXSSCRPSCASRNPRDAXDAIYXKKWL

SEQ ID NO: 1248 - protein, 112 aa, Homo sapiens
  SITE (1): Xaa equals any of the naturally occurring L-amino acids
  SITE (3): Xaa equals any of the naturally occurring L-amino acids
  SITE (6): Xaa equals any of the naturally occurring L-amino acids
  SITE (40): Xaa equals any of the naturally occurring L-amino acids
  SITE (43): Xaa equals any of the naturally occurring L-amino acids
  SITE (57): Xaa equals any of the naturally occurring L-amino acids
  SITE (58): Xaa equals any of the naturally occurring L-amino acids
  SITE (68): Xaa equals any of the naturally occurring L-amino acids
  SITE (84): Xaa equals any of the naturally occurring L-amino acids
  SITE (95): Xaa equals any of the naturally occurring L-amino acids
  SITE (100): Xaa equals any of the naturally occurring L-amino acids
  SITE (103): Xaa equals any of the naturally occurring L-amino acids
  SITE (106): Xaa equals any of the naturally occurring L-amino acids
XSXFGXPARRSGPELPGRPTRPATILKQMQVLHPAARMLXELXKAQDIEAGDGTTSXXIIAGSLLDSXTKLLQKGIHPTIISEXFQKALEKGIEXLTDMXRPXELXDRETLV

SEQ ID NO: 1249 - protein, 113 aa, Homo sapiens
  SITE (110): Xaa equals any of the naturally occurring L-amino acids
KFMNSRVFKKIQALKASPSKKRCNSIAALKATSQEIVSSISQEWKDEKRDLLTEGQSFSSLDEEALGSRHRPDLVPSTPSLFEAASLATTISLLPIRQWALSTRQGLQFXQTR

SEQ ID NO: 1250 - protein, 76 aa, Homo sapiens
  SITE (2): Xaa equals any of the naturally occurring L-amino acids
  SITE (24): Xaa equals any of the naturally occurring L-amino acids
  SITE (37): Xaa equals any of the naturally occurring L-amino acids
  SITE (53): Xaa equals any of the naturally occurring L-amino acids
  SITE (75): Xaa equals any of the naturally occurring L-amino acids
GXHVFRNIHKTNLCDLITSLLCLXVLLPTKELNEHFXSKLKAPIPIELVVVVXATLTSHFGKLHENYNSSIAGHXP

SEQ ID NO: 1251 - protein, 151 aa, Homo sapiens
LVSNGPADTLDLTYWIDGTRHVVSLEDVGLADSQWKNVTVQVAGETYSLHVGCDLIDSFALDEPFYEHLQAEKSRMYVAKGSARESHFRGLLQNVHLVFENSVEDILSKKGCQQGQGGRCVVKNAFYILAWMDFYCDMVYVCVCMCVHSCL

SEQ ID NO: 1252 - protein, 56 aa, Homo sapiens
KNGTSLCFSSATMSDKPDMAEIEKFDKSKLKKTETQEKNPLPSKETIEQEKQAGES

SEQ ID NO: 1253 - protein, 74 aa, Homo sapiens
  SITE (5): Xaa equals any of the naturally occurring L-amino acids
  SITE (22): Xaa equals any of the naturally occurring L-amino acids
  SITE (32): Xaa equals any of the naturally occurring L-amino acids
  SITE (42): Xaa equals any of the naturally occurring L-amino acids
  SITE (43): Xaa equals any of the naturally occurring L-amino acids
  SITE (44): Xaa equals any of the naturally occurring L-amino acids
  SITE (45): Xaa equals any of the naturally occurring L-amino acids
  SITE (49): Xaa equals any of the naturally occurring L-amino acids
  SITE (54): Xaa equals any of the naturally occurring L-amino acids
  SITE (60): Xaa equals any of the naturally occurring L-amino acids
  SITE (62): Xaa equals any of the naturally occurring L-amino acids
  SITE (65): Xaa equals any of the naturally occurring L-amino acids
  SITE (67): Xaa equals any of the naturally occurring L-amino acids
AEGPXAAALLLSLLLFGFTLVXGTGAEKTGVXPELQAAPATXXXXCVLXNSEMXRTTSKXLXGGXVXPSASLPQ

SEQ ID NO: 1254 - protein, 129 aa, Homo sapiens
  SITE (94): Xaa equals any of the naturally occurring L-amino acids
  SITE (109): Xaa equals any of the naturally occurring L-amino acids
  SITE (112): Xaa equals any of the naturally occurring L-amino acids
  SITE (116): Xaa equals any of the naturally occurring L-amino acids
  SITE (121): Xaa equals any of the naturally occurring L-amino acids
  SITE (125): Xaa equals any of the naturally occurring L-amino acids
SPARPLIRSDKMKETIMNQEKLAKLQAQVRIGGKGTARRKKKVVHRTATADDKKLQFSLKKLGVNNISGIEEVNMFTNQGTVIHFNNPKVQASXAANTFTITGHAETKXLTXMLPXILNQXGADXLTKF

SEQ ID NO: 1255 - protein, 188 aa, Homo sapiens
  SITE (1): Xaa equals any of the naturally occurring L-amino acids
  SITE (31): Xaa equals any of the naturally occurring L-amino acids
  SITE (99): Xaa equals any of the naturally occurring L-amino acids
  SITE (102): Xaa equals any of the naturally occurring L-amino acids
  SITE (165): Xaa equals any of the naturally occurring L-amino acids
  SITE (183): Xaa equals any of the naturally occurring L-amino acids
  SITE (188): Xaa equals any of the naturally occurring L-amino acids
XTSLETPVPVLNSRLDPRVRMTVPGASPEDXWVKVEYAYSDNSLDPGLFVESTRKGSVVSRANSIGSTSASSVPNTDDEDSDYHQEAYKESYKDRRRRXTHXRLEQKRRDAIKRGYDDLQTIVPTCQQQDFSIGSQKLSKAIVYKRPLTTFSFCTRRRKSRRRRXHVTQGCTGLKIMKVNYEXIVKAX

SEQ ID NO: 1256 - protein, 66 aa, Homo sapiens
  SITE (17): Xaa equals any of the naturally occurring L-amino acids
  SITE (27): Xaa equals any of the naturally occurring L-amino acids
  SITE (39): Xaa equals any of the naturally occurring L-amino acids
  SITE (55): Xaa equals any of the naturally occurring L-amino acids
  SITE (65): Xaa equals any of the naturally occurring L-amino acids
LPCVKVPVRNSRVDPRXRARMLNLLLXALAVLASRAYAXPAPGQALQRVGIVGGXEAPRSKWPWXV

SEQ ID NO: 1257 - protein, 146 aa, Homo sapiens
  SITE (2): Xaa equals any of the naturally occurring L-amino acids
  SITE (6): Xaa equals any of the naturally occurring L-amino acids
  SITE (12): Xaa equals any of the naturally occurring L-amino acids
  SITE (131): Xaa equals any of the naturally occurring L-amino acids
  SITE (135): Xaa equals any of the naturally occurring L-amino acids
  SITE (138): Xaa equals any of the naturally occurring L-amino acids
  SITE (145): Xaa equals any of the naturally occurring L-amino acids
GXEGKXFSVSGXWSSTAVAAALELVDPPGCRNSARAAQQRLTLCLRGRESPGGRHGGVGEPAQENGVQVFNDGSSRELMNLTGTIPVPYRGNTYNIPICLWLLDTYPYNPPICFVKPTSSMTIKTGKHVDXPKKXGGXKKGKILXF

SEQ ID NO: 1258 - protein, 35 aa, Homo sapiens
  SITE (1): Xaa equals any of the naturally occurring L-amino acids
  SITE (20): Xaa equals any of the naturally occurring L-amino acids
  SITE (21): Xaa equals any of the naturally occurring L-amino acids
  SITE (26): Xaa equals any of the naturally occurring L-amino acids
  SITE (27): Xaa equals any of the naturally occurring L-amino acids
  SITE (32): Xaa equals any of the naturally occurring L-amino acids
XIPPDHQTLIFAGKHLENGXXLSDYXXHKESXLHL

SEQ ID NO: 1259 - protein, 73 aa, Homo sapiens
  SITE (8): Xaa equals any of the naturally occurring L-amino acids
  SITE (11): Xaa equals any of the naturally occurring L-amino acids
  SITE (43): Xaa equals any of the naturally occurring L-amino acids
  SITE (48): Xaa equals any of the naturally occurring L-amino acids
VKVCMMMXLLXHRLLKWSWIVRSKLLLQDPPVTYIQQFADAAXNLTSXDSEKWNSVFPKPGTLVQVLEAAKFA

SEQ ID NO: 1260 - protein, 95 aa, Homo sapiens
  SITE (5): Xaa equals any of the naturally occurring L-amino acids
  SITE (6): Xaa equals any of the naturally occurring L-amino acids
  SITE (7): Xaa equals any of the naturally occurring L-amino acids
  SITE (38): Xaa equals any of the naturally occurring L-amino acids
  SITE (40): Xaa equals any of the naturally occurring L-amino acids
  SITE (42): Xaa equals any of the naturally occurring L-amino acids
  SITE (52): Xaa equals any of the naturally occurring L-amino acids
  SITE (65): Xaa equals any of the naturally occurring L-amino acids
  SITE (68): Xaa equals any of the naturally occurring L-amino acids
  SITE (76): Xaa equals any of the naturally occurring L-amino acids
  SITE (80): Xaa equals any of the naturally occurring L-amino acids
LCSTXXXRHNIQKELCLHAAQGLAQLKACTYKGHKTGXTXEXIWEIQKDQLXYYPFLKMCLSANXEHXSLVDATHXNHSXNGYLAKMIKRSLKLT

SEQ ID NO: 1261 - protein, 94 aa, Homo sapiens
  SITE (44): Xaa equals any of the naturally occurring L-amino acids
  SITE (86): Xaa equals any of the naturally occurring L-amino acids
  SITE (91): Xaa equals any of the naturally occurring L-amino acids
FGTRKRMETKGAGVTLNVLEMTSEDLENALKAVINDKSYKENIXRLSSLHKDRPVEPLDLAVFWVEFVMRHKGAPHLRPAPHGPHXVPVPXPWP

SEQ ID NO: 1262 - protein, 66 aa, Homo sapiens
GTGQHWHSQAVGKGRDAEVVSILTFRGLFLFVLIFARLILKTHVEELKECLEDQKSPMTGTKATNF

SEQ ID NO: 1263 - protein, 121 aa, Homo sapiens
  SITE (80): Xaa equals any of the naturally occurring L-amino acids
NTMAVAAVKWVMSKRTILKHLFPVQNGALYCVCHKSTYSPLPDDYNCNVELALTSDGRTIVCYHPSVDIPYEHTKPIPRXDPVHNNEETHDQVLKTRLEEKVEHLEEGPMIEQLSKMFLYY

SEQ ID NO: 1264 - protein, 101 aa, Homo sapiens
  SITE (67): Xaa equals any of the naturally occurring L-amino acids
  SITE (96): Xaa equals any of the naturally occurring L-amino acids
  SITE (100): Xaa equals any of the naturally occurring L-amino acids
  SITE (101): Xaa equals any of the naturally occurring L-amino acids
VASGVGRVTVNAYVSLFYTIKRAQVVSPERVGSWHIGRPSDPVQCLLAILPEQALKPKSHPRPVSAXAKASLSSGRRGKGAGDQALALGPSFSPHXGNKXX

SEQ ID NO: 1265 - protein, 43 aa, Homo sapiens
DLLMKMTISCCFYPTSAFSPFKAAVSCLIKEYWPVLQILTGFG

SEQ ID NO: 1266 - protein, 29 aa, Homo sapiens
  SITE (7): Xaa equals any of the naturally occurring L-amino acids
  SITE (9): Xaa equals any of the naturally occurring L-amino acids
  SITE (16): Xaa equals any of the naturally occurring L-amino acids
  SITE (19): Xaa equals any of the naturally occurring L-amino acids
GSWPGAXGXRDGSHGXRLXAHGPINLERI

SEQ ID NO: 1267 - protein, 59 aa, Homo sapiens
  SITE (1): Xaa equals any of the naturally occurring L-amino acids
  SITE (3): Xaa equals any of the naturally occurring L-amino acids
  SITE (5): Xaa equals any of the naturally occurring L-amino acids
  SITE (16): Xaa equals any of the naturally occurring L-amino acids
  SITE (19): Xaa equals any of the naturally occurring L-amino acids
  SITE (42): Xaa equals any of the naturally occurring L-amino acids
  SITE (43): Xaa equals any of the naturally occurring L-amino acids
  SITE (51): Xaa equals any of the naturally occurring L-amino acids
  SITE (59): Xaa equals any of the naturally occurring L-amino acids
XPXFXQELIQNFPDKXNLXLVFLLFFVLVNLGSNVIRNSLWXXATDAQPVXVDYSSSNX

SEQ ID NO: 1268 - protein, 49 aa, Homo sapiens
  SITE (9): Xaa equals any of the naturally occurring L-amino acids
  SITE (28): Xaa equals any of the naturally occurring L-amino acids
  SITE (37): Xaa equals any of the naturally occurring L-amino acids
  SITE (39): Xaa equals any of the naturally occurring L-amino acids
  SITE (41): Xaa equals any of the naturally occurring L-amino acids
VFKKNMSCXLSKNKMHLNSKKKKKKKKXGGGRGKKKXEXEXLKKGRGAP

SEQ ID NO: 1269 - protein, 61 aa, Homo sapiens
PTLPEENSVFFTFHTVFPMREGAQPESTTIMVKFPTESSCEWIIRKNEESKRQKSKNRWGL

SEQ ID NO: 1270 - protein, 29 aa, Homo sapiens
  SITE (27): Xaa equals any of the naturally occurring L-amino acids
  SITE (28): Xaa equals any of the naturally occurring L-amino acids
  SITE (29): Xaa equals any of the naturally occurring L-amino acids
NINKDHLMHAFKKKKKKKKKKKKKKKXXX

SEQ ID NO: 1271 - protein, 113 aa, Homo sapiens
  SITE (35): Xaa equals any of the naturally occurring L-amino acids
  SITE (37): Xaa equals any of the naturally occurring L-amino acids
  SITE (53): Xaa equals any of the naturally occurring L-amino acids
  SITE (60): Xaa equals any of the naturally occurring L-amino acids
  SITE (81): Xaa equals any of the naturally occurring L-amino acids
  SITE (82): Xaa equals any of the naturally occurring L-amino acids
  SITE (111): Xaa equals any of the naturally occurring L-amino acids
GPKEELRGGGGDMADLPRRVTRPLMMGLQGSSGLXAXTVQRKRAGIVTGSDGXHRSEREXAGTGIVTVTVTASTNGGSGAXXRGRDEARSWGRWPGQRVGRFGQRQPRILXEF

SEQ ID NO: 1272 - protein, 87 aa, Homo sapiens
  SITE (8): Xaa equals any of the naturally occurring L-amino acids
  SITE (14): Xaa equals any of the naturally occurring L-amino acids
  SITE (20): Xaa equals any of the naturally occurring L-amino acids
  SITE (26): Xaa equals any of the naturally occurring L-amino acids
  SITE (35): Xaa equals any of the naturally occurring L-amino acids
  SITE (54): Xaa equals any of the naturally occurring L-amino acids
  SITE (70): Xaa equals any of the naturally occurring L-amino acids
  SITE (71): Xaa equals any of the naturally occurring L-amino acids
  SITE (73): Xaa equals any of the naturally occurring L-amino acids
  SITE (76): Xaa equals any of the naturally occurring L-amino acids
GKSNVLWXQRRGRXQHLAWXSQGTQXRSPPGHNTXKASYSGVESFQQPGPVLGXYSHPPYRCVYVTLCHXXSXTIXNSQESPHFYNL

SEQ ID NO: 1273 - protein, 115 aa, Homo sapiens
  SITE (103): Xaa equals any of the naturally occurring L-amino acids
  SITE (105): Xaa equals any of the naturally occurring L-amino acids
HKAPLEHLPGWQDHAISVEKVLGREVLPVPHGVRPCPCWGLWGGIWYSGGLAQLSLRSFPIRMLVNILRSSLFSNKEYSFNSCSSSQFTTPICLSKIHPNGIXGXGPPWIQSVSW

SEQ ID NO: 1274 - protein, 37 aa, Homo sapiens
ELVSSFFFFFFLFFGSFKGNGPSMSIFNILHSLFLWC

SEQ ID NO: 1275 - protein, 107 aa, Homo sapiens
  SITE (25): Xaa equals any of the naturally occurring L-amino acids
  SITE (50): Xaa equals any of the naturally occurring L-amino acids
  SITE (57): Xaa equals any of the naturally occurring L-amino acids
  SITE (58): Xaa equals any of the naturally occurring L-amino acids
  SITE (66): Xaa equals any of the naturally occurring L-amino acids
  SITE (67): Xaa equals any of the naturally occurring L-amino acids
  SITE (68): Xaa equals any of the naturally occurring L-amino acids
  SITE (79): Xaa equals any of the naturally occurring L-amino acids
  SITE (84): Xaa equals any of the naturally occurring L-amino acids
  SITE (87): Xaa equals any of the naturally occurring L-amino acids
  SITE (91): Xaa equals any of the naturally occurring L-amino acids
  SITE (101): Xaa equals any of the naturally occurring L-amino acids
  SITE (102): Xaa equals any of the naturally occurring L-amino acids
  SITE (104): Xaa equals any of the naturally occurring L-amino acids
  SITE (106): Xaa equals any of the naturally occurring L-amino acids
DCGTLIIYHAGSPQKPCAHEPLWAXGEKRGLRELPERAVSWEQGDISSPXTRNMTQXXGNKKPSPXXXGGARPLKSTMXAGGIXVKXSGFXKDHIFFSQFXXPXFXC

SEQ ID NO: 1276 - protein, 85 aa, Homo sapiens
  SITE (6): Xaa equals any of the naturally occurring L-amino acids
  SITE (16): Xaa equals any of the naturally occurring L-amino acids
  SITE (17): Xaa equals any of the naturally occurring L-amino acids
  SITE (20): Xaa equals any of the naturally occurring L-amino acids
  SITE (25): Xaa equals any of the naturally occurring L-amino acids
  SITE (26): Xaa equals any of the naturally occurring L-amino acids
  SITE (28): Xaa equals any of the naturally occurring L-amino acids
  SITE (32): Xaa equals any of the naturally occurring L-amino acids
  SITE (63): Xaa equals any of the naturally occurring L-amino acids
  SITE (71): Xaa equals any of the naturally occurring L-amino acids
  SITE (72): Xaa equals any of the naturally occurring L-amino acids
  SITE (81): Xaa equals any of the naturally occurring L-amino acids
INKICXNLYPLLWHFXXIIXARKMXXNXGPGXEGKEPFLVAGNCVGKEVQICAYEISRNRWNXTPMQLLLXXKQGAWSNGXTLCL

SEQ ID NO: 1277 - protein, 40 aa, Homo sapiens
  SITE (33): Xaa equals any of the naturally occurring L-amino acids
WVYTVVRQVSFTLLMMCCCHGNPAQYERNRRFXHLVYVLG

SEQ ID NO: 1278 - protein, 65 aa, Homo sapiens
  SITE (8): Xaa equals any of the naturally occurring L-amino acids
  SITE (18): Xaa equals any of the naturally occurring L-amino acids
  SITE (30): Xaa equals any of the naturally occurring L-amino acids
  SITE (37): Xaa equals any of the naturally occurring L-amino acids
  SITE (47): Xaa equals any of the naturally occurring L-amino acids
  SITE (56): Xaa equals any of the naturally occurring L-amino acids
  SITE (64): Xaa equals any of the naturally occurring L-amino acids
  SITE (65): Xaa equals any of the naturally occurring L-amino acids
NYHSGGPXKTPAGDHLAXWLKPPVSISKFXPKEGVGXKIWGNLSPFXFFPGTPPLXGETLARGXX

SEQ ID NO: 1279 - protein, 28 aa, Homo sapiens
  SITE (11): Xaa equals any of the naturally occurring L-amino acids
  SITE (24): Xaa equals any of the naturally occurring L-amino acids
VIADCIALFLXRLSILIQKVSIFXNHEI

SEQ ID NO: 1280 - protein, 22 aa, Homo sapiens
  SITE (18): Xaa equals any of the naturally occurring L-amino acids
  SITE (22): Xaa equals any of the naturally occurring L-amino acids
YEGHFFFFFFFFFFFFFXPPPX

SEQ ID NO: 1281 - protein, 49 aa, Homo sapiens
  SITE (1): Xaa equals any of the naturally occurring L-amino acids
  SITE (2): Xaa equals any of the naturally occurring L-amino acids
  SITE (15): Xaa equals any of the naturally occurring L-amino acids
  SITE (17): Xaa equals any of the naturally occurring L-amino acids
  SITE (23): Xaa equals any of the naturally occurring L-amino acids
  SITE (32): Xaa equals any of the naturally occurring L-amino acids
XXLKDTCLKAEMEAXCXRRILCXNLAMCFPCXWADECLLNDEILTSKGG

SEQ ID NO: 1282 - protein, 86 aa, Homo sapiens
  SITE (25): Xaa equals any of the naturally occurring L-amino acids
  SITE (33): Xaa equals any of the naturally occurring L-amino acids
  SITE (37): Xaa equals any of the naturally occurring L-amino acids
  SITE (49): Xaa equals any of the naturally occurring L-amino acids
  SITE (67): Xaa equals any of the naturally occurring L-amino acids
  SITE (80): Xaa equals any of the naturally occurring L-amino acids
HEPASLSPAAWARKVCGSFSGSDFXTELHRPTXLSPXGLQGPGSRPKPXKSKTSLEKFRDRPGEMGXRYGVSHLTPEDAXFSLQGA

SEQ ID NO: 1283 - protein, 91 aa, Homo sapiens
  SITE (88): Xaa equals any of the naturally occurring L-amino acids
  SITE (91): Xaa equals any of the naturally occurring L-amino acids
TPLSQNPAQAERYGSAAEPRLASDSRSPACPRRRAAPPSTRPARAGGRVPRRAPGPGSGAECPSSWETGPGWKGGRLEDPSLRTRACXAIX

SEQ ID NO: 1284 - protein, 61 aa, Homo sapiens
  SITE (1): Xaa equals any of the naturally occurring L-amino acids
  SITE (3): Xaa equals any of the naturally occurring L-amino acids
  SITE (30): Xaa equals any of the naturally occurring L-amino acids
XEXAGKASTPAGTGPEFPGLPTFPHRCSYXYMQNICQALCQLSCTYGIETMELGTSWIFFL

SEQ ID NO: 1285 - protein, 63 aa, Homo sapiens
LTKSFKIFCDNVLIEAYIILQFLESKMMYPLRIYTSCFIGLRGLIFIRRDLLVFTICPLSWHV

SEQ ID NO: 1286 - protein, 35 aa, Homo sapiens
  SITE (12): Xaa equals any of the naturally occurring L-amino acids
  SITE (28): Xaa equals any of the naturally occurring L-amino acids
SLYPIHMLFKNXAITKKQIMVFFRNLIXVYSTKYF

SEQ ID NO: 1287 - protein, 73 aa, Homo sapiens
  SITE (1): Xaa equals any of the naturally occurring L-amino acids
  SITE (7): Xaa equals any of the naturally occurring L-amino acids
  SITE (8): Xaa equals any of the naturally occurring L-amino acids
  SITE (21): Xaa equals any of the naturally occurring L-amino acids
  SITE (30): Xaa equals any of the naturally occurring L-amino acids
  SITE (42): Xaa equals any of the naturally occurring L-amino acids
  SITE (47): Xaa equals any of the naturally occurring L-amino acids
  SITE (48): Xaa equals any of the naturally occurring L-amino acids
  SITE (49): Xaa equals any of the naturally occurring L-amino acids
  SITE (52): Xaa equals any of the naturally occurring L-amino acids
  SITE (54): Xaa equals any of the naturally occurring L-amino acids
  SITE (56): Xaa equals any of the naturally occurring L-amino acids
  SITE (63): Xaa equals any of the naturally occurring L-amino acids
  SITE (70): Xaa equals any of the naturally occurring L-amino acids
XEGVGFXXVDGGGEGRPPELXLMQSFLAMXNLSVIVLIIKFXVFKKXXXLSXLXFXTPWKVPXGGGAQSXWFS

SEQ ID NO: 1288 - protein, 77 aa, Homo sapiens
  SITE (29): Xaa equals any of the naturally occurring L-amino acids
  SITE (38): Xaa equals any of the naturally occurring L-amino acids
  SITE (41): Xaa equals any of the naturally occurring L-amino acids
  SITE (67): Xaa equals any of the naturally occurring L-amino acids
  SITE (69): Xaa equals any of the naturally occurring L-amino acids
  SITE (70): Xaa equals any of the naturally occurring L-amino acids
  SITE (75): Xaa equals any of the naturally occurring L-amino acids
  SITE (77): Xaa equals any of the naturally occurring L-amino acids
GQMLIFCLQKKLGFPKQFYYPVHNSFTQXSSHGIHGSXSFXLPDGRNKIIHFKKKKKKKKKKKKKRXAXXEDPSXRX

SEQ ID NO: 1289 - protein, 27 aa, Homo sapiens
  SITE (5): Xaa equals any of the naturally occurring L-amino acids
  SITE (7): Xaa equals any of the naturally occurring L-amino acids
  SITE (12): Xaa equals any of the naturally occurring L-amino acids
ARTAXAXEGVRXWDLTVGPISLFSALL

SEQ ID NO: 1290 - protein, 41 aa, Homo sapiens
NSARAHLHLPHSPPLLVPDTSTPTWSSPIAHKRGGTRDELS

SEQ ID NO: 1291 - protein, 93 aa, Homo sapiens
  SITE (11): Xaa equals any of the naturally occurring L-amino acids
  SITE (38): Xaa equals any of the naturally occurring L-amino acids
  SITE (81): Xaa equals any of the naturally occurring L-amino acids
  SITE (86): Xaa equals any of the naturally occurring L-amino acids
  SITE (88): Xaa equals any of the naturally occurring L-amino acids
SRRPGPRGLVXASGRGPGSSQSFPSPNDVAFFVVCFRXLKQPRRRLYWLSALATAVVMVTGPNSRWPKPTCHRAGSLVGRXQARGXAXAEHSF

SEQ ID NO: 1292 - protein, 130 aa, Homo sapiens
  SITE (112): Xaa equals any of the naturally occurring L-amino acids
  SITE (119): Xaa equals any of the naturally occurring L-amino acids
QAAEPKEFAPRCGPTWLGPCPGRVILCSEAISGTGPPRPTPPEHGSRLPQPSWLRRLSEPRGGLEGRFVCRDGARAQVLDVVCIERPKAGGKCTGHKRSLSCDAQVLRSGRXPAGSGHXWVHRGAFQTNM

SEQ ID NO: 1293 - protein, 31 aa, Homo sapiens
  SITE (9): Xaa equals any of the naturally occurring L-amino acids
  SITE (19): Xaa equals any of the naturally occurring L-amino acids
  SITE (23): Xaa equals any of the naturally occurring L-amino acids
  SITE (30): Xaa equals any of the naturally occurring L-amino acids
WFPHSRCFXIRIRVLLERXSCSXYRIVVVXF

SEQ ID NO: 1294 - protein, 35 aa, Homo sapiens
  SITE (3): Xaa equals any of the naturally occurring L-amino acids
  SITE (19): Xaa equals any of the naturally occurring L-amino acids
  SITE (21): Xaa equals any of the naturally occurring L-amino acids
  SITE (23): Xaa equals any of the naturally occurring L-amino acids
  SITE (30): Xaa equals any of the naturally occurring L-amino acids
GGXVPNCPYSECVLQLTGXWXYXVVDWEKXWGYPT

SEQ ID NO: 1295 - protein, 84 aa, Homo sapiens
  SITE (39): Xaa equals any of the naturally occurring L-amino acids
  SITE (44): Xaa equals any of the naturally occurring L-amino acids
  SITE (46): Xaa equals any of the naturally occurring L-amino acids
  SITE (76): Xaa equals any of the naturally occurring L-amino acids
  SITE (79): Xaa equals any of the naturally occurring L-amino acids
  SITE (83): Xaa equals any of the naturally occurring L-amino acids
FQFANRTNTGENLPKTLVIKYISSTFRSFFFWDSVSNKXIKIKXGXHFAVAAVQRTLLNLYVRHSMLYWGNLGRSXVFXIHIXI

SEQ ID NO: 1296 - protein, 35 aa, Homo sapiens
  SITE (2): Xaa equals any of the naturally occurring L-amino acids
  SITE (6): Xaa equals any of the naturally occurring L-amino acids
  SITE (15): Xaa equals any of the naturally occurring L-amino acids
  SITE (25): Xaa equals any of the naturally occurring L-amino acids
  SITE (34): Xaa equals any of the naturally occurring L-amino acids
SXNVVXLPFVKAPKXRNPNLTCNTXLTQNGSYIXL

SEQ ID NO: 1297 - protein, 102 aa, Homo sapiens
  SITE (7): Xaa equals any of the naturally occurring L-amino acids
  SITE (8): Xaa equals any of the naturally occurring L-amino acids
  SITE (9): Xaa equals any of the naturally occurring L-amino acids
  SITE (27): Xaa equals any of the naturally occurring L-amino acids
  SITE (28): Xaa equals any of the naturally occurring L-amino acids
  SITE (80): Xaa equals any of the naturally occurring L-amino acids
  SITE (94): Xaa equals any of the naturally occurring L-amino acids
  SITE (97): Xaa equals any of the naturally occurring L-amino acids
  SITE (102): Xaa equals any of the naturally occurring L-amino acids
GVLARAXXXPGAADGRARLCGPEVGAXXAKVAGAAEPDEDGGRSGFGTAETTHRASAWARRSDAVVPGRHSGRHRDGQKXRRVFVVFVAVMMNXLHXWLQVX

SEQ ID NO: 1298 - protein, 51 aa, Homo sapiens
  SITE (33): Xaa equals any of the naturally occurring L-amino acids
  SITE (34): Xaa equals any of the naturally occurring L-amino acids
  SITE (37): Xaa equals any of the naturally occurring L-amino acids
CKQYLTNPQVLNYQTCIKNFGWGDLGAEPSLRXXHAXTSPVKANYYTRLIQ

SEQ ID NO: 1299 - protein, 64 aa, Homo sapiens
  SITE (3): Xaa equals any of the naturally occurring L-amino acids
  SITE (16): Xaa equals any of the naturally occurring L-amino acids
  SITE (22): Xaa equals any of the naturally occurring L-amino acids
  SITE (23): Xaa equals any of the naturally occurring L-amino acids
  SITE (24): Xaa equals any of the naturally occurring L-amino acids
  SITE (26): Xaa equals any of the naturally occurring L-amino acids
  SITE (42): Xaa equals any of the naturally occurring L-amino acids
  SITE (46): Xaa equals any of the naturally occurring L-amino acids
RTXQGEGQRRRPCKSXVKKKKXXXPXYRLEEVKDKDGKPLLXKESXGTASTHGVEDFLLGWLCV

SEQ ID NO: 1300 - protein, 58 aa, Homo sapiens
  SITE (14): Xaa equals any of the naturally occurring L-amino acids
  SITE (48): Xaa equals any of the naturally occurring L-amino acids
  SITE (49): Xaa equals any of the naturally occurring L-amino acids
  SITE (58): Xaa equals any of the naturally occurring L-amino acids
KMKLCRKCSPQHDXERNSGTRFFPVPLFSQGSAGIQGQRISLPECAKXXEKGNCLSLX

SEQ ID NO: 1301 - protein, 37 aa, Homo sapiens
  SITE (5): Xaa equals any of the naturally occurring L-amino acids
  SITE (13): Xaa equals any of the naturally occurring L-amino acids
  SITE (20): Xaa equals any of the naturally occurring L-amino acids
  SITE (32): Xaa equals any of the naturally occurring L-amino acids
  SITE (36): Xaa equals any of the naturally occurring L-amino acids
TLVQXVVSGASVXGKSPPYXKWNSPEPVCERXTGVXS

SEQ ID NO: 1302 - protein, 75 aa, Homo sapiens
QEEALHILGFQPPFEDIRFGPFTGNTTLMRWFRQINDHFHVKGCSYVLYKPHGKNKTAGETASGALSKLTRGIER

SEQ ID NO: 1303 - protein, 26 aa, Homo sapiens
  SITE (2): Xaa equals any of the naturally occurring L-amino acids
  SITE (3): Xaa equals any of the naturally occurring L-amino acids
  SITE (8): Xaa equals any of the naturally occurring L-amino acids
  SITE (9): Xaa equals any of the naturally occurring L-amino acids
  SITE (11): Xaa equals any of the naturally occurring L-amino acids
AXXHHPWXXLXWERFRCNINCDEDPK

SEQ ID NO: 1304 - protein, 46 aa, Homo sapiens
  SITE (5): Xaa equals any of the naturally occurring L-amino acids
  SITE (7): Xaa equals any of the naturally occurring L-amino acids
  SITE (13): Xaa equals any of the naturally occurring L-amino acids
  SITE (16): Xaa equals any of the naturally occurring L-amino acids
  SITE (17): Xaa equals any of the naturally occurring L-amino acids
  SITE (18): Xaa equals any of the naturally occurring L-amino acids
  SITE (31): Xaa equals any of the naturally occurring L-amino acids
  SITE (42): Xaa equals any of the naturally occurring L-amino acids
  SITE (45): Xaa equals any of the naturally occurring L-amino acids
GRVKXFXGAPGNXADXXXFRTQMMDLELAMXRQNHGLSSYDXGGXV

SEQ ID NO: 1305 - protein, 70 aa, Homo sapiens
  SITE (5): Xaa equals any of the naturally occurring L-amino acids
  SITE (18): Xaa equals any of the naturally occurring L-amino acids
  SITE (31): Xaa equals any of the naturally occurring L-amino acids
  SITE (32): Xaa equals any of the naturally occurring L-amino acids
  SITE (34): Xaa equals any of the naturally occurring L-amino acids
  SITE (37): Xaa equals any of the naturally occurring L-amino acids
  SITE (38): Xaa equals any of the naturally occurring L-amino acids
  SITE (42): Xaa equals any of the naturally occurring L-amino acids
  SITE (50): Xaa equals any of the naturally occurring L-amino acids
  SITE (52): Xaa equals any of the naturally occurring L-amino acids
  SITE (53): Xaa equals any of the naturally occurring L-amino acids
  SITE (55): Xaa equals any of the naturally occurring L-amino acids
  SITE (64): Xaa equals any of the naturally occurring L-amino acids
  SITE (68): Xaa equals any of the naturally occurring L-amino acids
KSEGXMFCETFIFLKEKXKGRPISSQDHTHXXGXGHXXSMAXFVKFGCFXNXXLXKWMWPKTFXLGWXGK

SEQ ID NO: 1306 - protein, 45 aa, Homo sapiens
  SITE (1): Xaa equals any of the naturally occurring L-amino acids
  SITE (11): Xaa equals any of the naturally occurring L-amino acids
  SITE (18): Xaa equals any of the naturally occurring L-amino acids
  SITE (30): Xaa equals any of the naturally occurring L-amino acids
  SITE (31): Xaa equals any of the naturally occurring L-amino acids
  SITE (34): Xaa equals any of the naturally occurring L-amino acids
  SITE (40): Xaa equals any of the naturally occurring L-amino acids
  SITE (41): Xaa equals any of the naturally occurring L-amino acids
XLTVKDAGGQXIPGVPEXSCHVGVKAEGAXXTQXDRGARXXSQAF

SEQ ID NO: 1307 - protein, 38 aa, Homo sapiens
  SITE (16): Xaa equals any of the naturally occurring L-amino acids
QSTRAEYESKAEGVMXGQAFRKFQQGAAGNMKGMMGIQ

SEQ ID NO: 1308 - protein, 59 aa, Homo sapiens
  SITE (1): Xaa equals any of the naturally occurring L-amino acids
  SITE (4): Xaa equals any of the naturally occurring L-amino acids
  SITE (10): Xaa equals any of the naturally occurring L-amino acids
  SITE (18): Xaa equals any of the naturally occurring L-amino acids
  SITE (33): Xaa equals any of the naturally occurring L-amino acids
  SITE (35): Xaa equals any of the naturally occurring L-amino acids
  SITE (36): Xaa equals any of the naturally occurring L-amino acids
  SITE (37): Xaa equals any of the naturally occurring L-amino acids
  SITE (41): Xaa equals any of the naturally occurring L-amino acids
  SITE (42): Xaa equals any of the naturally occurring L-amino acids
  SITE (43): Xaa equals any of the naturally occurring L-amino acids
  SITE (44): Xaa equals any of the naturally occurring L-amino acids
  SITE (47): Xaa equals any of the naturally occurring L-amino acids
  SITE (48): Xaa equals any of the naturally occurring L-amino acids
  SITE (49): Xaa equals any of the naturally occurring L-amino acids
  SITE (59): Xaa equals any of the naturally occurring L-amino acids
XVSXFRKPLXCANHSRKXNLYLGYNTTVSYVTXAXXXPLCXXXXAKXXXRKKGKRKTNX

SEQ ID NO: 1309 - protein, 30 aa, Homo sapiens
  SITE (12): Xaa equals any of the naturally occurring L-amino acids
  SITE (19): Xaa equals any of the naturally occurring L-amino acids
  SITE (23): Xaa equals any of the naturally occurring L-amino acids
GTRSLEHAAGLXGLSQVCXPRRXSARPVQP

SEQ ID NO: 1310 - protein, 67 aa, Homo sapiens
  SITE (46): Xaa equals any of the naturally occurring L-amino acids
SYNHGTKNFIEIFKHLIKLKLLFQMFKFYHPFFSHEFLKDYALMLXSILLFLKIPGIFWYHVQPTSL

SEQ ID NO: 1311 - protein, 99 aa, Homo sapiens
  SITE (70): Xaa equals any of the naturally occurring L-amino acids
  SITE (81): Xaa equals any of the naturally occurring L-amino acids
  SITE (91): Xaa equals any of the naturally occurring L-amino acids
  SITE (97): Xaa equals any of the naturally occurring L-amino acids
SPSLWVVPWRGWSSSSSSPTSSAGRGVTQATRLSSLVHAGTAAAGASVPFSGLRVLSKGGHTFWQTFLKXGSSNVKFHLGXHLTMHNRLIXEMDGVXFG

SEQ ID NO: 1312 - protein, 34 aa, Homo sapiens
  SITE (3): Xaa equals any of the naturally occurring L-amino acids
  SITE (15): Xaa equals any of the naturally occurring L-amino acids
  SITE (27): Xaa equals any of the naturally occurring L-amino acids
GIXVQEGRGLAVAEXHKKVTRPGAADXARRPHLY

SEQ ID NO: 1313 - protein, 50 aa, Homo sapiens
  SITE (26): Xaa equals any of the naturally occurring L-amino acids
  SITE (50): Xaa equals any of the naturally occurring L-amino acids
TVVRQVSFTLLMMCCCHGNPAQYERXRSSDIGVCAGLRSQWGETTHLWGX

SEQ ID NO: 1314 - protein, 54 aa, Homo sapiens
TVVRQVSFTLLMMCCCHGNPAQYERNRSSDIWCMCLAEEPMGRTTICGIMTERL

SEQ ID NO: 1315 - protein, 84 aa, Homo sapiens
  SITE (63): Xaa equals any of the naturally occurring L-amino acids
  SITE (75): Xaa equals any of the naturally occurring L-amino acids
  SITE (79): Xaa equals any of the naturally occurring L-amino acids
  SITE (82): Xaa equals any of the naturally occurring L-amino acids
  SITE (83): Xaa equals any of the naturally occurring L-amino acids
TAGRWPWKSESAKECVTTHLPNQLALKMDGAGASGPYPAVAGSREWTGAAGAARARAVLVFAXFPVGKRPNPLPXWFLXPQXXT

SEQ ID NO: 1316 - protein, 68 aa, Homo sapiens
  SITE (13): Xaa equals any of the naturally occurring L-amino acids
  SITE (20): Xaa equals any of the naturally occurring L-amino acids
  SITE (62): Xaa equals any of the naturally occurring L-amino acids
  SITE (66): Xaa equals any of the naturally occurring L-amino acids
  SITE (68): Xaa equals any of the naturally occurring L-amino acids
KSTSTQGWSAQWXTEHGLLXSLQYFEFIFLPIYVLYAAGAPLKFYSVLQKKKKKKKKRGAPXKGPXFX

SEQ ID NO: 1317 - protein, 51 aa, Homo sapiens
  SITE (2): Xaa equals any of the naturally occurring L-amino acids
  SITE (3): Xaa equals any of the naturally occurring L-amino acids
  SITE (5): Xaa equals any of the naturally occurring L-amino acids
  SITE (14): Xaa equals any of the naturally occurring L-amino acids
  SITE (16): Xaa equals any of the naturally occurring L-amino acids
  SITE (28): Xaa equals any of the naturally occurring L-amino acids
  SITE (35): Xaa equals any of the naturally occurring L-amino acids
  SITE (38): Xaa equals any of the naturally occurring L-amino acids
  SITE (40): Xaa equals any of the naturally occurring L-amino acids
IXXPXGGPKPPPFXKXFSPPPPPRNPPXFFSPPPXDPXPXKKFFFFLKTPP

SEQ ID NO: 1318 - protein, 78 aa, Homo sapiens
  SITE (17): Xaa equals any of the naturally occurring L-amino acids
  SITE (43): Xaa equals any of the naturally occurring L-amino acids
  SITE (54): Xaa equals any of the naturally occurring L-amino acids
  SITE (60): Xaa equals any of the naturally occurring L-amino acids
  SITE (73): Xaa equals any of the naturally occurring L-amino acids
DFNLHQPLKCRPLCDWXYALLKCHKAASHLWGYCYKFFLSLKXPFLLSSVGKFXQISSSXPGRNHSPQGNLPXLFLGC

SEQ ID NO: 1319 - protein, 28 aa, Homo sapiens
  SITE (17): Xaa equals any of the naturally occurring L-amino acids
  SITE (23): Xaa equals any of the naturally occurring L-amino acids
  SITE (28): Xaa equals any of the naturally occurring L-amino acids
HLDVPSCLLKKKKKTRXGARYPXPPNSX

SEQ ID NO: 1320 - protein, 27 aa, Homo sapiens
  SITE (13): Xaa equals any of the naturally occurring L-amino acids
  SITE (14): Xaa equals any of the naturally occurring L-amino acids
  SITE (18): Xaa equals any of the naturally occurring L-amino acids
  SITE (19): Xaa equals any of the naturally occurring L-amino acids
  SITE (21): Xaa equals any of the naturally occurring L-amino acids
GKHGKGSGKWACXXLGRXXLXPALMVT

SEQ ID NO: 1321 - protein, 71 aa, Homo sapiens
QSPIHFSCTRMLWKSLMTRTVFSLHCLALGFEKKIREGRSGISWPKFPLGRTGRCCSSKREGFFQSHLPES

SEQ ID NO: 1322 - protein, 80 aa, Homo sapiens
  SITE (32): Xaa equals any of the naturally occurring L-amino acids
  SITE (59): Xaa equals any of the naturally occurring L-amino acids
  SITE (63): Xaa equals any of the naturally occurring L-amino acids
  SITE (66): Xaa equals any of the naturally occurring L-amino acids
  SITE (73): Xaa equals any of the naturally occurring L-amino acids
  SITE (74): Xaa equals any of the naturally occurring L-amino acids
  SITE (79): Xaa equals any of the naturally occurring L-amino acids
  SITE (80): Xaa equals any of the naturally occurring L-amino acids
GGSTSSLKILEGMEESQHVFLTQDPWFVLKAXNPQVPAFDDVYRKCWLTEHICPIPGVXRKPXIFXIPNFFLXXKKKMXX

SEQ ID NO: 1323 - protein, 57 aa, Homo sapiens
  SITE (12): Xaa equals any of the naturally occurring L-amino acids
  SITE (14): Xaa equals any of the naturally occurring L-amino acids
  SITE (30): Xaa equals any of the naturally occurring L-amino acids
QGLNPYTFWHNXIXLGNELCKGEPKLKTPXNQTELTLRNSLKEAHPSYVGKIVGKVF

SEQ ID NO: 1324 - protein, 31 aa, Homo sapiens
  SITE (12): Xaa equals any of the naturally occurring L-amino acids
  SITE (19): Xaa equals any of the naturally occurring L-amino acids
KRKLREGRNLNXLMKIMLXIIKTGYEYSNPF

SEQ ID NO: 1325 - protein, 40 aa, Homo sapiens
  SITE (32): Xaa equals any of the naturally occurring L-amino acids
LEITLQGEPKLRPPKPDELPKKQLKEHTRLCXKIVGRFIG

SEQ ID NO: 1326 - protein, 65 aa, Homo sapiens
  SITE (14): Xaa equals any of the naturally occurring L-amino acids
  SITE (15): Xaa equals any of the naturally occurring L-amino acids
  SITE (54): Xaa equals any of the naturally occurring L-amino acids
  SITE (55): Xaa equals any of the naturally occurring L-amino acids
  SITE (58): Xaa equals any of the naturally occurring L-amino acids
AYKKEKEQSQERTXXKCFGTSLFLDFELSNWFSQVKLKNSETWFYESCSYTFLXXGPXLLPRLLT

SEQ ID NO: 1327 - protein, 48 aa, Homo sapiens
  SITE (7): Xaa equals any of the naturally occurring L-amino acids
  SITE (23): Xaa equals any of the naturally occurring L-amino acids
  SITE (33): Xaa equals any of the naturally occurring L-amino acids
  SITE (37): Xaa equals any of the naturally occurring L-amino acids
  SITE (38): Xaa equals any of the naturally occurring L-amino acids
  SITE (44): Xaa equals any of the naturally occurring L-amino acids
  SITE (48): Xaa equals any of the naturally occurring L-amino acids
WEKFIGXKRQTYEPGDTGCSQNXILVSLLILAXEPPXXPWLIYXLVPX

SEQ ID NO: 1328 - protein, 72 aa, Homo sapiens
  SITE (7): Xaa equals any of the naturally occurring L-amino acids
  SITE (12): Xaa equals any of the naturally occurring L-amino acids
  SITE (14): Xaa equals any of the naturally occurring L-amino acids
  SITE (18): Xaa equals any of the naturally occurring L-amino acids
  SITE (30): Xaa equals any of the naturally occurring L-amino acids
  SITE (34): Xaa equals any of the naturally occurring L-amino acids
  SITE (44): Xaa equals any of the naturally occurring L-amino acids
  SITE (60): Xaa equals any of the naturally occurring L-amino acids
  SITE (63): Xaa equals any of the naturally occurring L-amino acids
  SITE (68): Xaa equals any of the naturally occurring L-amino acids
  SITE (69): Xaa equals any of the naturally occurring L-amino acids
LDQKKSXLFDLXRXNLPXLYTHVCVSLKRXVRLXKILIVINHVXTSCNELHDLILSLLAXTTXYFSNXXISP

SEQ ID NO: 1329 - protein, 19 aa, Homo sapiens
  SITE (3): Xaa equals any of the naturally occurring L-amino acids
  SITE (16): Xaa equals any of the naturally occurring L-amino acids
  SITE (19): Xaa equals any of the naturally occurring L-amino acids
TIXCELLKWIIGHGLXAAX

SEQ ID NO: 1330 - protein, 80 aa, Homo sapiens
  SITE (25): Xaa equals any of the naturally occurring L-amino acids
  SITE (27): Xaa equals any of the naturally occurring L-amino acids
  SITE (41): Xaa equals any of the naturally occurring L-amino acids
  SITE (46): Xaa equals any of the naturally occurring L-amino acids
  SITE (49): Xaa equals any of the naturally occurring L-amino acids
  SITE (62): Xaa equals any of the naturally occurring L-amino acids
  SITE (64): Xaa equals any of the naturally occurring L-amino acids
  SITE (65): Xaa equals any of the naturally occurring L-amino acids
  SITE (68): Xaa equals any of the naturally occurring L-amino acids
  SITE (74): Xaa equals any of the naturally occurring L-amino acids
PLYLLHNELTRNNFARRAKAKTPEXRXATLEQLKEHTRLCXKIVGXIYXLKRQTYRPGDTGXPXXILXHFNLPXNLLIPC

SEQ ID NO: 1331 - protein, 61 aa, Homo sapiens
  SITE (21): Xaa equals any of the naturally occurring L-amino acids
  SITE (50): Xaa equals any of the naturally occurring L-amino acids
  SITE (55): Xaa equals any of the naturally occurring L-amino acids
IINNNKNKANTLDITLPSGAXKKVKAGISFSYLNLSVLSQGIFSENRWNXVRLWXMLSIIG

SEQ ID NO: 1332 - protein, 97 aa, Homo sapiens
  SITE (3): Xaa equals any of the naturally occurring L-amino acids
  SITE (6): Xaa equals any of the naturally occurring L-amino acids
  SITE (17): Xaa equals any of the naturally occurring L-amino acids
  SITE (25): Xaa equals any of the naturally occurring L-amino acids
  SITE (36): Xaa equals any of the naturally occurring L-amino acids
  SITE (42): Xaa equals any of the naturally occurring L-amino acids
  SITE (59): Xaa equals any of the naturally occurring L-amino acids
  SITE (61): Xaa equals any of the naturally occurring L-amino acids
  SITE (62): Xaa equals any of the naturally occurring L-amino acids
  SITE (67): Xaa equals any of the naturally occurring L-amino acids
  SITE (78): Xaa equals any of the naturally occurring L-amino acids
  SITE (92): Xaa equals any of the naturally occurring L-amino acids
  SITE (95): Xaa equals any of the naturally occurring L-amino acids
  SITE (96): Xaa equals any of the naturally occurring L-amino acids
KVXGLXSPGPEIPGSTXTVRINTVXPLIYLLLSPIXNTHAAXLSVDGGYHLDPLLLLEXPXXLWALXRKSRIIWKTLXFSSRLYQKIPKTDXAVXXQ

SEQ ID NO: 1333 - protein, 94 aa, Homo sapiens
  SITE (1): Xaa equals any of the naturally occurring L-amino acids
  SITE (15): Xaa equals any of the naturally occurring L-amino acids
  SITE (38): Xaa equals any of the naturally occurring L-amino acids
  SITE (42): Xaa equals any of the naturally occurring L-amino acids
  SITE (53): Xaa equals any of the naturally occurring L-amino acids
  SITE (88): Xaa equals any of the naturally occurring L-amino acids
XFLPPSARPRAGRRXPLRGQCQVGSLTGAVHLSNGNAXVLRXAQGGQKPPVEXKGKSSLDLDFQYEYKTVKAGPHDPSDLLGFKQEVXEKLPQG

SEQ ID NO: 1334 - protein, 55 aa, Homo sapiens
  SITE (10): Xaa equals any of the naturally occurring L-amino acids
  SITE (49): Xaa equals any of the naturally occurring L-amino acids
  SITE (52): Xaa equals any of the naturally occurring L-amino acids
  SITE (54): Xaa equals any of the naturally occurring L-amino acids
  SITE (55): Xaa equals any of the naturally occurring L-amino acids
TCGPPVKYHXSDRFFTDPVRRGGEPRGALASGAKRPAARRPGATRSGDXARXGXX

SEQ ID NO: 1335 - protein, 143 aa, Homo sapiens
  SITE (1): Xaa equals any of the naturally occurring L-amino acids
  SITE (6): Xaa equals any of the naturally occurring L-amino acids
  SITE (7): Xaa equals any of the naturally occurring L-amino acids
  SITE (36): Xaa equals any of the naturally occurring L-amino acids
  SITE (38): Xaa equals any of the naturally occurring L-amino acids
  SITE (127): Xaa equals any of the naturally occurring L-amino acids
  SITE (128): Xaa equals any of the naturally occurring L-amino acids
XTIVLXXTPAGTGPEFPGRPTRPPIFPVDNAIDNGXEXQVALPILMAAYAMAEAFMSTGVGASLILIALKVGITAKTVAVIGAIVTSILSIATGTSWGTFAACAPIFLWLNHIVGGNILFDNKQLLXXEHVLEDNIGLFQILQ

SEQ ID NO: 1336 - protein, 65 aa, Homo sapiens
  SITE (1): Xaa equals any of the naturally occurring L-amino acids
  SITE (13): Xaa equals any of the naturally occurring L-amino acids
  SITE (26): Xaa equals any of the naturally occurring L-amino acids
  SITE (44): Xaa equals any of the naturally occurring L-amino acids
  SITE (55): Xaa equals any of the naturally occurring L-amino acids
  SITE (58): Xaa equals any of the naturally occurring L-amino acids
XALGLALPGRLLXSHSRRTPSRESRXPPAPLYSARAQHGAPAGXHVRASDCRGDXDFXRSSGRME

SEQ ID NO: 1337 - protein, 42 aa, Homo sapiens
  SITE (2): Xaa equals any of the naturally occurring L-amino acids
  SITE (7): Xaa equals any of the naturally occurring L-amino acids
  SITE (8): Xaa equals any of the naturally occurring L-amino acids
  SITE (12): Xaa equals any of the naturally occurring L-amino acids
  SITE (23): Xaa equals any of the naturally occurring L-amino acids
  SITE (34): Xaa equals any of the naturally occurring L-amino acids
  SITE (40): Xaa equals any of the naturally occurring L-amino acids
TXAHSVXXPHSXGHCGQRVLACXLLSILKAMDFXGPFSSXLP

SEQ ID NO: 1338 - protein, 35 aa, Homo sapiens
  SITE (25): Xaa equals any of the naturally occurring L-amino acids
FNKLSSALSEFSGPNIYVEKDGGVXHLCTDHLYVR

SEQ ID NO: 1339 - protein, 79 aa, Homo sapiens
  SITE (32): Xaa equals any of the naturally occurring L-amino acids
  SITE (33): Xaa equals any of the naturally occurring L-amino acids
  SITE (47): Xaa equals any of the naturally occurring L-amino acids
  SITE (59): Xaa equals any of the naturally occurring L-amino acids
  SITE (68): Xaa equals any of the naturally occurring L-amino acids
DIEAKPSHYQLVSGSSTEDSLHVHAQMAENEXXGSGGGGSEEDPPCXHQSCEQKDCLAXKPWDISLAXPESIRSDLESS

SEQ ID NO: 1340 - protein, 69 aa, Homo sapiens
  SITE (9): Xaa equals any of the naturally occurring L-amino acids
  SITE (60): Xaa equals any of the naturally occurring L-amino acids
  SITE (65): Xaa equals any of the naturally occurring L-amino acids
  SITE (67): Xaa equals any of the naturally occurring L-amino acids
  SITE (69): Xaa equals any of the naturally occurring L-amino acids
GKGTFPKNXFWGNKNVDCEKKKKKKKKKKKKKKKKKKKKKKKKKKKKKKKKKKKKKKKKXGGPFXKXKX

SEQ ID NO: 1341 - protein, 70 aa, Homo sapiens
  SITE (1): Xaa equals any of the naturally occurring L-amino acids
  SITE (4): Xaa equals any of the naturally occurring L-amino acids
  SITE (64): Xaa equals any of the naturally occurring L-amino acids
  SITE (68): Xaa equals any of the naturally occurring L-amino acids
XWSXLAAQKEQSGLEGSIKFYTHKLQLEVSFLKCPAFAQLFQIISFLRLWQVSCPPSYSSVFTXSRQXSG

SEQ ID NO: 1342 - protein, 121 aa, Homo sapiens
  SITE (95): Xaa equals any of the naturally occurring L-amino acids
EPDPNSENIAAISQSSVGSDLFVFKPSEPRPLYIQKGISREKVQWGVFVPRDVPESFTSEAYQWLNRSQFYFLTKSQSLLTFSTKSPEEKLTPTXQTAASRRKSSHNPILFHIGKTQATAG

SEQ ID NO: 1343 - protein, 36 aa, Homo sapiens
NTKGDREELKDLQYCTQKLIILCTFYLFWRFYMIFN

SEQ ID NO: 1344 - protein, 32 aa, Homo sapiens
  SITE (15): Xaa equals any of the naturally occurring L-amino acids
  SITE (21): Xaa equals any of the naturally occurring L-amino acids
  SITE (31): Xaa equals any of the naturally occurring L-amino acids
  SITE (32): Xaa equals any of the naturally occurring L-amino acids
AVAVSGPGPVGVLLXLWLTPXPGTLNDRSRXX

SEQ ID NO: 1345 - protein, 63 aa, Homo sapiens
  SITE (19): Xaa equals any of the naturally occurring L-amino acids
  SITE (28): Xaa equals any of the naturally occurring L-amino acids
  SITE (46): Xaa equals any of the naturally occurring L-amino acids
  SITE (52): Xaa equals any of the naturally occurring L-amino acids
  SITE (54): Xaa equals any of the naturally occurring L-amino acids
  SITE (61): Xaa equals any of the naturally occurring L-amino acids
HLVKAGRKINNTKLCYLIXLLERVRFTXYIFKLIHVKNDSDFDVIXLLIESXIXKANNLKXAI

SEQ ID NO: 1346 - protein, 64 aa, Homo sapiens
  SITE (11): Xaa equals any of the naturally occurring L-amino acids
  SITE (15): Xaa equals any of the naturally occurring L-amino acids
  SITE (50): Xaa equals any of the naturally occurring L-amino acids
  SITE (52): Xaa equals any of the naturally occurring L-amino acids
  SITE (57): Xaa equals any of the naturally occurring L-amino acids
  SITE (63): Xaa equals any of the naturally occurring L-amino acids
  SITE (64): Xaa equals any of the naturally occurring L-amino acids
AGADRGGGGWXRLGXINLLIDCDSKKKKKKKKKKKKKKKKKKKKKKKKKXKXKKKKXKKKKKXX

SEQ ID NO: 1347 - protein, 45 aa, Homo sapiens
  SITE (33): Xaa equals any of the naturally occurring L-amino acids
  SITE (42): Xaa equals any of the naturally occurring L-amino acids
FLIMSNDCKSAWIFTCKGYSCIVRSPSPAESSXHWLAVCCVXHSF

SEQ ID NO: 1348 - protein, 59 aa, Homo sapiens
  SITE (53): Xaa equals any of the naturally occurring L-amino acids
GFLVLMLVKVCAGISKSLKKVFTGHWAVVREGLTNPWIPDNWSWGGVASEHCXCYRVLH

SEQ ID NO: 1349 - protein, 63 aa, Homo sapiens
FCPCVRQSEQRVIQSAANKAADSSVQKAKKELYVRHLFLLISIFLLTHTLSHVKRKINKWSEL

SEQ ID NO: 1350 - protein, 38 aa, Homo sapiens
  SITE (30): Xaa equals any of the naturally occurring L-amino acids
YIYYRPNELNIALLYSPKGLNSCFFPSFIXRKHYDRIS

SEQ ID NO: 1351 - protein, 77 aa, Homo sapiens
  SITE (12): Xaa equals any of the naturally occurring L-amino acids
  SITE (66): Xaa equals any of the naturally occurring L-amino acids
LLPEDQVQLQPXGRWLPTSSPGLSSSPSSPVILCCLDSTIPSLFLLHLLPLEPPLPSWDFWEVPAXQPRHKTIMVTW

SEQ ID NO: 1352 - protein, 28 aa, Homo sapiens
  SITE (1): Xaa equals any of the naturally occurring L-amino acids
  SITE (6): Xaa equals any of the naturally occurring L-amino acids
  SITE (21): Xaa equals any of the naturally occurring L-amino acids
  SITE (26): Xaa equals any of the naturally occurring L-amino acids
XLLRDXMGHYVWLFYIKPTTXFRVGXMN

SEQ ID NO: 1353 - protein, 79 aa, Homo sapiens
  SITE (11): Xaa equals any of the naturally occurring L-amino acids
  SITE (17): Xaa equals any of the naturally occurring L-amino acids
  SITE (18): Xaa equals any of the naturally occurring L-amino acids
  SITE (30): Xaa equals any of the naturally occurring L-amino acids
  SITE (36): Xaa equals any of the naturally occurring L-amino acids
  SITE (62): Xaa equals any of the naturally occurring L-amino acids
  SITE (70): Xaa equals any of the naturally occurring L-amino acids
  SITE (74): Xaa equals any of the naturally occurring L-amino acids
  SITE (76): Xaa equals any of the naturally occurring L-amino acids
  SITE (78): Xaa equals any of the naturally occurring L-amino acids
PRLQTLNLVLXSADNGXXPRLYNRRSAKDXGVLGGXLVFPKVFQIKVVFVLKKKKKKKLGGXFLGGARGXHGFXQXGXG

SEQ ID NO: 1354 - protein, 40 aa, Homo sapiens
  SITE (21): Xaa equals any of the naturally occurring L-amino acids
  SITE (22): Xaa equals any of the naturally occurring L-amino acids
  SITE (24): Xaa equals any of the naturally occurring L-amino acids
  SITE (33): Xaa equals any of the naturally occurring L-amino acids
  SITE (35): Xaa equals any of the naturally occurring L-amino acids
GDPAQFPGRPRVRTIGRRSFXXWXNSHFPHEEXKXGQKPN

SEQ ID NO: 1355 - protein, 40 aa, Homo sapiens
  SITE (25): Xaa equals any of the naturally occurring L-amino acids
  SITE (34): Xaa equals any of the naturally occurring L-amino acids
  SITE (36): Xaa equals any of the naturally occurring L-amino acids
DINGDFKVEINMYSMFLKKKKKKKXPGGAPVPIXPXGGPF

SEQ ID NO: 1356 - protein, 81 aa, Homo sapiens
  SITE (18): Xaa equals any of the naturally occurring L-amino acids
PGEAGGRAPRGSRFWRQXPGRAPAGRDPLRGQCQVGSLTGAVHLSNGNAGVLRRAQGGQKPPVEQKGKSSLDLDFQYEYRP

SEQ ID NO: 1357 - protein, 73 aa, Homo sapiens
  SITE (38): Xaa equals any of the naturally occurring L-amino acids
  SITE (42): Xaa equals any of the naturally occurring L-amino acids
TPLSQNPAQAERYGSAAEPRLASDSRSPACPRRRAAPXSTRXARAGGRVPRRAPGPGSGAECPSSWETGRGRK

SEQ ID NO: 1358 - protein, 66 aa, Homo sapiens
  SITE (2): Xaa equals any of the naturally occurring L-amino acids
  SITE (6): Xaa equals any of the naturally occurring L-amino acids
  SITE (19): Xaa equals any of the naturally occurring L-amino acids
  SITE (34): Xaa equals any of the naturally occurring L-amino acids
  SITE (51): Xaa equals any of the naturally occurring L-amino acids
  SITE (54): Xaa equals any of the naturally occurring L-amino acids
  SITE (62): Xaa equals any of the naturally occurring L-amino acids
GXRPRXWIRTSRWCSRYKXFVCSTIKVLRDLNSXRSNPGRFLSTSNSSLYXRTXRYKAYFSXRLPP

SEQ ID NO: 1359 - protein, 73 aa, Homo sapiens
  SITE (62): Xaa equals any of the naturally occurring L-amino acids
  SITE (64): Xaa equals any of the naturally occurring L-amino acids
  SITE (73): Xaa equals any of the naturally occurring L-amino acids
RPKWRRVPCEQQLNMGQSVLRDGRAPFRRDGRWPPLPSADRKGVGFRSPNPEWRRWRREASXRXRDRSRRSPX

SEQ ID NO: 1360 - protein, 38 aa, Homo sapiens
  SITE (21): Xaa equals any of the naturally occurring L-amino acids
TRPVNNKKGVIRIGMWIFTVXTTHLQFCNARMQFKNVK

SEQ ID NO: 1361 - protein, 54 aa, Homo sapiens [sequence omitted]

SEQ ID NO: 1362 - protein, 139 aa, Homo sapiens
  SITE (58): Xaa equals any of the naturally occurring L-amino acids
  SITE (62): Xaa equals any of the naturally occurring L-amino acids
  SITE (69): Xaa equals any of the naturally occurring L-amino acids
  SITE (70): Xaa equals any of the naturally occurring L-amino acids
  SITE (111): Xaa equals any of the naturally occurring L-amino acids
  SITE (112): Xaa equals any of the naturally occurring L-amino acids
  SITE (124): Xaa equals any of the naturally occurring L-amino acids
  SITE (138): Xaa equals any of the naturally occurring L-amino acids
SFDVGSSYHCEAEFTKRWIVHPHEPCAFGVNNVQFVDVIESRGLSPFYICINFNLLKXKKEXEKQFIKXXKSNQPQQQKRMVWYWRRDGQLSLLAHDGMDLGPGTTFILRXXLWIPREGQPFRXGLYPEGGTEFGQTXH

SEQ ID NO: 1363 - protein, 58 aa, Homo sapiens
  SITE (11): Xaa equals any of the naturally occurring L-amino acids
  SITE (56): Xaa equals any of the naturally occurring L-amino acids
AFRKYYVKNLXSLHARHSFNHFSDHFSKILKHPHLGFSLNLGVPSPHPAAFCVRGXRS

SEQ ID NO: 1364 - protein, 21 aa, Homo sapiens
  SITE (16): Xaa equals any of the naturally occurring L-amino acids
  SITE (18): Xaa equals any of the naturally occurring L-amino acids
  SITE (19): Xaa equals any of the naturally occurring L-amino acids
PYSESYYNSLAVVLQXRXXEN

SEQ ID NO: 1365 - protein, 69 aa, Homo sapiens
  SITE (12): Xaa equals any of the naturally occurring L-amino acids
  SITE (21): Xaa equals any of the naturally occurring L-amino acids
  SITE (22): Xaa equals any of the naturally occurring L-amino acids
  SITE (23): Xaa equals any of the naturally occurring L-amino acids
  SITE (24): Xaa equals any of the naturally occurring L-amino acids
  SITE (25): Xaa equals any of the naturally occurring L-amino acids
  SITE (26): Xaa equals any of the naturally occurring L-amino acids
  SITE (31): Xaa equals any of the naturally occurring L-amino acids
  SITE (34): Xaa equals any of the naturally occurring L-amino acids
  SITE (46): Xaa equals any of the naturally occurring L-amino acids
  SITE (51): Xaa equals any of the naturally occurring L-amino acids
  SITE (54): Xaa equals any of the naturally occurring L-amino acids
  SITE (58): Xaa equals any of the naturally occurring L-amino acids
  SITE (64): Xaa equals any of the naturally occurring L-amino acids
  SITE (65): Xaa equals any of the naturally occurring L-amino acids
  SITE (69): Xaa equals any of the naturally occurring L-amino acids
YTAIMSIMSYNXGAVMAMKGXXXXXXHRCRXALXESRPRMVNHGTXRKIFXHGXNRLXMGLGRXXQLRX

SEQ ID NO: 1366 - protein, 42 aa, Homo sapiens
  SITE (29): Xaa equals any of the naturally occurring L-amino acids
  SITE (33): Xaa equals any of the naturally occurring L-amino acids
  SITE (34): Xaa equals any of the naturally occurring L-amino acids
  SITE (41): Xaa equals any of the naturally occurring L-amino acids
LAILRLFKVFSNIKKYHQRSPAMLKTNNXKQTXXKNLKKKXG

SEQ ID NO: 1367 - protein, 24 aa, Homo sapiens
  SITE (16): Xaa equals any of the naturally occurring L-amino acids
  SITE (24): Xaa equals any of the naturally occurring L-amino acids
STLSNRLVWVHWHSLXYCLIADTX

SEQ ID NO: 1368 - protein, 79 aa, Homo sapiens
  SITE (1): Xaa equals any of the naturally occurring L-amino acids
  SITE (3): Xaa equals any of the naturally occurring L-amino acids
  SITE (9): Xaa equals any of the naturally occurring L-amino acids
  SITE (11): Xaa equals any of the naturally occurring L-amino acids
  SITE (16): Xaa equals any of the naturally occurring L-amino acids
  SITE (23): Xaa equals any of the naturally occurring L-amino acids
  SITE (65): Xaa equals any of the naturally occurring L-amino acids
  SITE (68): Xaa equals any of the naturally occurring L-amino acids
  SITE (78): Xaa equals any of the naturally occurring L-amino acids
XHXWKLILXLXLGYFXFGGESAXFFRRGPGFFKGKKHSYSKLQNNGVNMLNRSIRKPNTGLSRRXLVXRALGKNKGKXK

SEQ ID NO: 1369 - protein, 76 aa, Homo sapiens
  SITE (76): Xaa equals any of the naturally occurring L-amino acids
NQRQLSCCVSSCWILSLGPTVCQYSCELYVPPVLHTQVCVSVYACFKQTLNVHMYIIYTYLYHISSFITIDYTNWX

SEQ ID NO: 1370 - protein, 50 aa, Homo sapiens
  SITE (33): Xaa equals any of the naturally occurring L-amino acids
  SITE (35): Xaa equals any of the naturally occurring L-amino acids
  SITE (44): Xaa equals any of the naturally occurring L-amino acids
  SITE (49): Xaa equals any of the naturally occurring L-amino acids
ARAYLLVASNLTPSLSEYVQPKRTNWLLCTSLXIXLLSMVLRSXTVYLXL

SEQ ID NO: 1371 - protein, 76 aa, Homo sapiens
  SITE (20): Xaa equals any of the naturally occurring L-amino acids
  SITE (46): Xaa equals any of the naturally occurring L-amino acids
  SITE (53): Xaa equals any of the naturally occurring L-amino acids
  SITE (64): Xaa equals any of the naturally occurring L-amino acids
  SITE (65): Xaa equals any of the naturally occurring L-amino acids
  SITE (68): Xaa equals any of the naturally occurring L-amino acids
  SITE (76): Xaa equals any of the naturally occurring L-amino acids
EKTFVERVKNLTPHSRPKSXHQLKKAFKLQHPLPKKFQTYNWNFLXPNWDQFXTPIRKKLMVSXXVTXEKHFSFRX

SEQ ID NO: 1372 - protein, 58 aa, Homo sapiens
ICPQNPLNPLVNLTVSPKRNSSLDTRKKPCRESKKFNTHSRPKSSHQLRKRSSSTPTT

SEQ ID NO: 1373 - protein, 52 aa, Homo sapiens
  SITE (17): Xaa equals any of the naturally occurring L-amino acids
  SITE (20): Xaa equals any of the naturally occurring L-amino acids
SLDLICPYERPGKNRLXAPXLVELCPSSDACQERVEPRTLTKGGPGYPIAAL

SEQ ID NO: 1374 - protein, 114 aa, Homo sapiens
  SITE (14): Xaa equals any of the naturally occurring L-amino acids
  SITE (93): Xaa equals any of the naturally occurring L-amino acids
  SITE (108): Xaa equals any of the naturally occurring L-amino acids
  SITE (113): Xaa equals any of the naturally occurring L-amino acids
ARAEDPHIDESKAXHQAIIMSTSLRVSPSIHGYHFDTASRKKAVGNIFENTDQESLERLFRNSGDKKAEERAKIIFAIDQDVEEKTRALMALXEEDKRQAFPFLKLRXFSFKXH

SEQ ID NO: 1375 - protein, 105 aa, Homo sapiens
  SITE (76): Xaa equals any of the naturally occurring L-amino acids
  SITE (87): Xaa equals any of the naturally occurring L-amino acids
  SITE (94): Xaa equals any of the naturally occurring L-amino acids
  SITE (102): Xaa equals any of the naturally occurring L-amino acids
ARQDTQEERAAPGSRPGLHAEAGGRRCPAESPELRRPALVPAPSGRRFESDWCLAASSSVRDHEVLPSVVLKLFLXSFSSALVTGEXPGNGFRXRLTAGNKXTGT

SEQ ID NO: 1376 - protein, 25 aa, Homo sapiens
  SITE (11): Xaa equals any of the naturally occurring L-amino acids
  SITE (15): Xaa equals any of the naturally occurring L-amino acids
  SITE (20): Xaa equals any of the naturally occurring L-amino acids
RPTRPPTRPVXSIPXLWAAXVSPPK

SEQ ID NO: 1377 - protein, 38 aa, Homo sapiens
  SITE (3): Xaa equals any of the naturally occurring L-amino acids
  SITE (22): Xaa equals any of the naturally occurring L-amino acids
FTXNSLYFSCIKTLCCSHSWSXSPLHGDCGVGLDEVGQ

SEQ ID NO: 1378 - protein, 46 aa, Homo sapiens
  SITE (2): Xaa equals any of the naturally occurring L-amino acids
  SITE (12): Xaa equals any of the naturally occurring L-amino acids
  SITE (23): Xaa equals any of the naturally occurring L-amino acids
  SITE (30): Xaa equals any of the naturally occurring L-amino acids
  SITE (40): Xaa equals any of the naturally occurring L-amino acids
  SITE (45): Xaa equals any of the naturally occurring L-amino acids
  SITE (46): Xaa equals any of the naturally occurring L-amino acids
FXKRGPSSPVAXVLELLDPPGCXNSAREGXVGRARRFPAXVSARXX

SEQ ID NO: 1379 - protein, 34 aa, Homo sapiens
  SITE (4): Xaa equals any of the naturally occurring L-amino acids
  SITE (6): Xaa equals any of the naturally occurring L-amino acids
  SITE (14): Xaa equals any of the naturally occurring L-amino acids
  SITE (29): Xaa equals any of the naturally occurring L-amino acids
LLKXTXSCSYPPLXAEPCLIQQPGGTTRXPSLTL

SEQ ID NO: 1380 - protein, 26 aa, Homo sapiens
  SITE (15): Xaa equals any of the naturally occurring L-amino acids
  SITE (19): Xaa equals any of the naturally occurring L-amino acids
  SITE (21): Xaa equals any of the naturally occurring L-amino acids
  SITE (24): Xaa equals any of the naturally occurring L-amino acids
HRHAHKERLKKKKKXSRGXPXTKXAP

SEQ ID NO: 1381 - protein, 120 aa, Homo sapiens
  SITE (44): Xaa equals any of the naturally occurring L-amino acids
  SITE (46): Xaa equals any of the naturally occurring L-amino acids
  SITE (120): Xaa equals any of the naturally occurring L-amino acids
DAEGRPEGRLFGMTGAGLGRDSGRWREVSFFGETERARGGTVGXRXHSVAAAGVRDSPPISCSLGPWGRSGHRSDCHADGDHRRELGGRKAPPPAGRGPLTTSRLPVPLLKSNCCPFEAX

SEQ ID NO: 1382 - protein, 50 aa, Homo sapiens
  SITE (9): Xaa equals any of the naturally occurring L-amino acids
FKCSILMPXNKSFGNTNWSIIGNAGMFRLSQQCFAFLCLFSVNTNEVNIA

SEQ ID NO: 1383 - protein, 92 aa, Homo sapiens
QSAALPPVTLALLCLDGVFLSSAENDFVHRIQEVEEDGPSSCSEDDYSELLQEITDNLTRKEIQIEKIHLDTSSFMEELPGEKDLAHVVEIL

SEQ ID NO: 1384 - protein, 106 aa, Homo sapiens
  SITE (56): Xaa equals any of the naturally occurring L-amino acids
  SITE (78): Xaa equals any of the naturally occurring L-amino acids
  SITE (96): Xaa equals any of the naturally occurring L-amino acids
  SITE (103): Xaa equals any of the naturally occurring L-amino acids
  SITE (105): Xaa equals any of the naturally occurring L-amino acids
NPSAHPSIHPSVRPSMSPVDRPAPLAGWVHPPSTWLTCHGRLCPASNPILNSPKAXGAVQTGVPSIFSPTGVFPHAVXYNPHSFLGPMNFRAVPFXPGHLLCXLXK

SEQ ID NO: 1385 - protein, 66 aa, Homo sapiens
  SITE (5): Xaa equals any of the naturally occurring L-amino acids
  SITE (6): Xaa equals any of the naturally occurring L-amino acids
  SITE (7): Xaa equals any of the naturally occurring L-amino acids
  SITE (18): Xaa equals any of the naturally occurring L-amino acids
  SITE (22): Xaa equals any of the naturally occurring L-amino acids
  SITE (26): Xaa equals any of the naturally occurring L-amino acids
  SITE (28): Xaa equals any of the naturally occurring L-amino acids
  SITE (35): Xaa equals any of the naturally occurring L-amino acids
  SITE (43): Xaa equals any of the naturally occurring L-amino acids
  SITE (46): Xaa equals any of the naturally occurring L-amino acids
  SITE (51): Xaa equals any of the naturally occurring L-amino acids
  SITE (57): Xaa equals any of the naturally occurring L-amino acids
  SITE (59): Xaa equals any of the naturally occurring L-amino acids
  SITE (60): Xaa equals any of the naturally occurring L-amino acids
  SITE (64): Xaa equals any of the naturally occurring L-amino acids
IQGLXXXGSSLPSPSTRXSLTXATGXLXRGFRSLXGWVPGNGXRSXLGAPXGCPMGXLXXFRGXWG

SEQ ID NO: 1386 - protein, 48 aa, Homo sapiens
  SITE (5): Xaa equals any of the naturally occurring L-amino acids
  SITE (13): Xaa equals any of the naturally occurring L-amino acids
  SITE (15): Xaa equals any of the naturally occurring L-amino acids
  SITE (40): Xaa equals any of the naturally occurring L-amino acids
KISSXWAEKLTGXYXVTNRIQVGWPLCTELQVTSGETWAXTWKAKTEA

SEQ ID NO: 1387 - protein, 37 aa, Homo sapiens
  SITE (23): Xaa equals any of the naturally occurring L-amino acids
  SITE (24): Xaa equals any of the naturally occurring L-amino acids
  SITE (25): Xaa equals any of the naturally occurring L-amino acids
  SITE (27): Xaa equals any of the naturally occurring L-amino acids
  SITE (35): Xaa equals any of the naturally occurring L-amino acids
AIYRIVWAFSCKWSEGVTFSPLXXXVXPILNKGRXET

SEQ ID NO: 1388 - protein, 41 aa, Homo sapiens
  SITE (2): Xaa equals any of the naturally occurring L-amino acids
  SITE (6): Xaa equals any of the naturally occurring L-amino acids
  SITE (11): Xaa equals any of the naturally occurring L-amino acids
GXARKXDARIXKAWVRRAGTGSGNSRGRPTRSGIMEYNMSS

SEQ ID NO: 1389 - protein, 41 aa, Homo sapiens
  SITE (1): Xaa equals any of the naturally occurring L-amino acids
  SITE (4): Xaa equals any of the naturally occurring L-amino acids
  SITE (6): Xaa equals any of the naturally occurring L-amino acids
  SITE (13): Xaa equals any of the naturally occurring L-amino acids
  SITE (16): Xaa equals any of the naturally occurring L-amino acids
  SITE (25): Xaa equals any of the naturally occurring L-amino acids
  SITE (33): Xaa equals any of the naturally occurring L-amino acids
  SITE (38): Xaa equals any of the naturally occurring L-amino acids
XCLXFXCRSLLVXSGXTRRHVSPPXSSPIFRVXPLLNXQRP

SEQ ID NO: 1390 - protein, 39 aa, Homo sapiens
  SITE (10): Xaa equals any of the naturally occurring L-amino acids
GLCTFGSFYXKLKCYYLGLYLASAFSFNCKVEAIKQYFS

SEQ ID NO: 1391 - protein, 71 aa, Homo sapiens
  SITE (9): Xaa equals any of the naturally occurring L-amino acids
  SITE (50): Xaa equals any of the naturally occurring L-amino acids
  SITE (70): Xaa equals any of the naturally occurring L-amino acids
KARVYPMKXAGSQLPPQPFKRKHLLHRAVLGVKRLLTYDRVRKSHILVNXPFGLKKKKKNSRGGPGYPIXP

SEQ ID NO: 1392 - protein, 58 aa, Homo sapiens
  SITE (26): Xaa equals any of the naturally occurring L-amino acids
  SITE (46): Xaa equals any of the naturally occurring L-amino acids
RRITFWGSHAEGGSVTLPEKRVSYPXSPGSTLKKDLATEGALGLPXSLDSSYKCPCSQ

SEQ ID NO: 1393 - protein, 42 aa, Homo sapiens
  SITE (4): Xaa equals any of the naturally occurring L-amino acids
  SITE (9): Xaa equals any of the naturally occurring L-amino acids
  SITE (32): Xaa equals any of the naturally occurring L-amino acids
  SITE (42): Xaa equals any of the naturally occurring L-amino acids
GRAXAAGPXPAAGAVASYDYLVIGGGSGGLAXVVESHKLGGX

SEQ ID NO: 1394 - protein, 38 aa, Homo sapiens
  SITE (29): Xaa equals any of the naturally occurring L-amino acids
  SITE (38): Xaa equals any of the naturally occurring L-amino acids
GTRLSTAQLSPAQSNPAQPSPTQPSSAQXSPAQLSSAX

SEQ ID NO: 1395 - protein, 66 aa, Homo sapiens
KLKKHFLKGALIKSEVFWLSFFSVYIFFLSLWHRVDLKYSSSILHSSPSIGSSSFNEFQLYLTSAS

SEQ ID NO: 1396 - protein, 46 aa, Homo sapiens [sequence omitted]

SEQ ID NO: 1397 - protein, 45 aa, Homo sapiens
  SITE (39): Xaa equals any of the naturally occurring L-amino acids
  SITE (40): Xaa equals any of the naturally occurring L-amino acids
MEFRLLTFNVIINIVGFKCTVLLFVSYLCQLFFNVFCSXXFLFFP

SEQ ID NO: 1398 - protein, 63 aa, Homo sapiens
  SITE (5): Xaa equals any of the naturally occurring L-amino acids
  SITE (26): Xaa equals any of the naturally occurring L-amino acids
  SITE (40): Xaa equals any of the naturally occurring L-amino acids
  SITE (45): Xaa equals any of the naturally occurring L-amino acids
  SITE (49): Xaa equals any of the naturally occurring L-amino acids
  SITE (54): Xaa equals any of the naturally occurring L-amino acids
  SITE (57): Xaa equals any of the naturally occurring L-amino acids
  SITE (58): Xaa equals any of the naturally occurring L-amino acids
  SITE (62): Xaa equals any of the naturally occurring L-amino acids
NFYSXKNLGFPLNIPPFFPSFPQIPXFYFFGEIRFAPFFXPTLLXEMPXPWNEXKGXXLRLXG

SEQ ID NO: 1399 - protein, 45 aa, Homo sapiens
  SITE (3): Xaa equals any of the naturally occurring L-amino acids
  SITE (8): Xaa equals any of the naturally occurring L-amino acids
  SITE (13): Xaa equals any of the naturally occurring L-amino acids
  SITE (35): Xaa equals any of the naturally occurring L-amino acids
  SITE (44): Xaa equals any of the naturally occurring L-amino acids
  SITE (45): Xaa equals any of the naturally occurring L-amino acids
ILXHFKFXHRTSXSLVNLMLSKKEQLLGPKKKLVXKLKFTPCSXX

SEQ ID NO: 1400 - protein, 69 aa, Homo sapiens
  SITE (33): Xaa equals any of the naturally occurring L-amino acids
  SITE (35): Xaa equals any of the naturally occurring L-amino acids
  SITE (49): Xaa equals any of the naturally occurring L-amino acids
  SITE (50): Xaa equals any of the naturally occurring L-amino acids
  SITE (60): Xaa equals any of the naturally occurring L-amino acids
DFAKSYLRNTIEGTPAGTGPEFPGRPTRPVLGXTXQTQDRVDSACDGVXXLLAPLHQCLXHIYIWCAQE

SEQ ID NO: 1401 - protein, 29 aa, Homo sapiens
  SITE (10): Xaa equals any of the naturally occurring L-amino acids
  SITE (19): Xaa equals any of the naturally occurring L-amino acids
  SITE (23): Xaa equals any of the naturally occurring L-amino acids
  SITE (24): Xaa equals any of the naturally occurring L-amino acids
RLKNARGYWXISSYEERSXSMKXXGRKMS

SEQ ID NO: 1402 - protein, 74 aa, Homo sapiens
  SITE (4): Xaa equals any of the naturally occurring L-amino acids
  SITE (37): Xaa equals any of the naturally occurring L-amino acids
  SITE (47): Xaa equals any of the naturally occurring L-amino acids
  SITE (49): Xaa equals any of the naturally occurring L-amino acids
  SITE (51): Xaa equals any of the naturally occurring L-amino acids
SCSXRHEPQVQTFGVCAWLRSQWGEATICGIMTERLXVRIPPRRNDXAXPXILGWPLISGPPPVPAGGAGPGSR

SEQ ID NO: 1403 - protein, 64 aa, Homo sapiens
  SITE (19): Xaa equals any of the naturally occurring L-amino acids
  SITE (34): Xaa equals any of the naturally occurring L-amino acids
  SITE (44): Xaa equals any of the naturally occurring L-amino acids
  SITE (52): Xaa equals any of the naturally occurring L-amino acids
  SITE (60): Xaa equals any of the naturally occurring L-amino acids
TSTVKSTKLLATTLRATAXNSKELAVLHIPLKRXCSVIDKPRSXSPLLLTYXQKKKKNSXGAGS

SEQ ID NO: 1404 - protein, 42 aa, Homo sapiens
  SITE (2): Xaa equals any of the naturally occurring L-amino acids
  SITE (6): Xaa equals any of the naturally occurring L-amino acids
  SITE (16): Xaa equals any of the naturally occurring L-amino acids
  SITE (17): Xaa equals any of the naturally occurring L-amino acids
  SITE (18): Xaa equals any of the naturally occurring L-amino acids
  SITE (22): Xaa equals any of the naturally occurring L-amino acids
  SITE (27): Xaa equals any of the naturally occurring L-amino acids
  SITE (34): Xaa equals any of the naturally occurring L-amino acids
GXNTHXKSPHLTIPPXXXKNAXIRMTXVFLLSKXDPSCAPLA

SEQ ID NO: 1405 - protein, 84 aa, Homo sapiens
KLLLQGLATCRQEEAELDIRPQGCHLSCRAWPCGQGAVLCLVGPQPLRAEMLSVPQGKGRVFWKALPWTFVLGLRGPTLPHTCP

SEQ ID NO: 1406 - protein, 60 aa, Homo sapiens
LLGDKKAWEGPVPKPSLPGDWAVIPLLPGLLPWPPRGADTLAPGAGENPPGGRRKARAGD

SEQ ID NO: 1407 - protein, 97 aa, Homo sapiens
QNPLSSPFGPGLRGPGGAGGELSGATTPCPQWTNHSSSQGWALEVPGRRVPLPSAIHVRSLVGGPQSHSGKGSRVQPSSCSFPSLISINLSTPLLWG

SEQ ID NO: 1408 - protein, 36 aa, Homo sapiens
  SITE (4): Xaa equals any of the naturally occurring L-amino acids
  SITE (6): Xaa equals any of the naturally occurring L-amino acids
  SITE (8): Xaa equals any of the naturally occurring L-amino acids
  SITE (12): Xaa equals any of the naturally occurring L-amino acids
  SITE (13): Xaa equals any of the naturally occurring L-amino acids
  SITE (36): Xaa equals any of the naturally occurring L-amino acids
NPGXPXVXFPPXXKETTTWGKKKKKKKKKKKKNKEX

SEQ ID NO: 1409 - protein, 70 aa, Homo sapiens
  SITE (37): Xaa equals any of the naturally occurring L-amino acids
  SITE (44): Xaa equals any of the naturally occurring L-amino acids
  SITE (46): Xaa equals any of the naturally occurring L-amino acids
  SITE (67): Xaa equals any of the naturally occurring L-amino acids
CQECRLVYVPGGGTQRGAPGFPCPPAALPLFPFFPDXRPEPVPXLXINLCEIKKKKKKNSGGGPVPXWAL

SEQ ID NO: 1410 - protein, 149 aa, Homo sapiens
  SITE (20): Xaa equals any of the naturally occurring L-amino acids
  SITE (22): Xaa equals any of the naturally occurring L-amino acids
  SITE (24): Xaa equals any of the naturally occurring L-amino acids
  SITE (40): Xaa equals any of the naturally occurring L-amino acids
  SITE (45): Xaa equals any of the naturally occurring L-amino acids
  SITE (47): Xaa equals any of the naturally occurring L-amino acids
  SITE (53): Xaa equals any of the naturally occurring L-amino acids
  SITE (74): Xaa equals any of the naturally occurring L-amino acids
  SITE (85): Xaa equals any of the naturally occurring L-amino acids
  SITE (100): Xaa equals any of the naturally occurring L-amino acids
  SITE (122): Xaa equals any of the naturally occurring L-amino acids
  SITE (123): Xaa equals any of the naturally occurring L-amino acids
  SITE (124): Xaa equals any of the naturally occurring L-amino acids
  SITE (130): Xaa equals any of the naturally occurring L-amino acids
  SITE (138): Xaa equals any of the naturally occurring L-amino acids
  SITE (143): Xaa equals any of the naturally occurring L-amino acids
GRAPEEQDALYLQRREAASXPXLXLPESRKDPPWDSSVCXKDAPXLXPGFPSXRHRTQFSRPGGRAPITPQAKXKPPCPGPKPLXPPFPWFPREPVTTLXRALTPMASFLWFSPRGQLVPNXXXRLGFPXKKNFGFIXKKKRXGGGGPG

SEQ ID NO: 1411 - protein, 65 aa, Homo sapiens
  SITE (2): Xaa equals any of the naturally occurring L-amino acids
  SITE (6): Xaa equals any of the naturally occurring L-amino acids
  SITE (10): Xaa equals any of the naturally occurring L-amino acids
  SITE (19): Xaa equals any of the naturally occurring L-amino acids
  SITE (27): Xaa equals any of the naturally occurring L-amino acids
  SITE (37): Xaa equals any of the naturally occurring L-amino acids
  SITE (48): Xaa equals any of the naturally occurring L-amino acids
  SITE (50): Xaa equals any of the naturally occurring L-amino acids
  SITE (55): Xaa equals any of the naturally occurring L-amino acids
PXLGIXNLLXSSHCPKPSXCLLDAYSXCGYGGSLSPXSDMSSLLGVNXSXEDTFXNKLFPQLISV

SEQ ID NO: 1412 - protein, 116 aa, Homo sapiens
  SITE (78): Xaa equals any of the naturally occurring L-amino acids
  SITE (79): Xaa equals any of the naturally occurring L-amino acids
EFQSMGSRLSQPFESYITAPPGTAAAPAKPAPPATPGAPTSPAEHRLLKTCWSCRVLSGLGLMGAGGYVYWVARKPMXXGYPPSPWTITQMVIGLSENQGIATWGIVVMADPKGKA

SEQ ID NO: 1413 - protein, 52 aa, Homo sapiens
  SITE (17): Xaa equals any of the naturally occurring L-amino acids
  SITE (41): Xaa equals any of the naturally occurring L-amino acids
  SITE (46): Xaa equals any of the naturally occurring L-amino acids
NLSSTLNLPQNPLNPLXNLTVVQRGTALWTLGKNLVERGKXYTHSXPKSSTN

SEQ ID NO: 1414 - protein, 52 aa, Homo sapiens
  SITE (49): Xaa equals any of the naturally occurring L-amino acids
PTEQVTLGITAQSYSRVHINNRVYDLDVGSGHPDGAAAIKGSFGQRLKXYVI

SEQ ID NO: 1415 - protein, 55 aa, Homo sapiens
  SITE (5): Xaa equals any of the naturally occurring L-amino acids
  SITE (27): Xaa equals any of the naturally occurring L-amino acids
  SITE (28): Xaa equals any of the naturally occurring L-amino acids
  SITE (29): Xaa equals any of the naturally occurring L-amino acids
  SITE (41): Xaa equals any of the naturally occurring L-amino acids
  SITE (45): Xaa equals any of the naturally occurring L-amino acids
SKSAXFQRLWYGLSAASNKMKSQNRAXXXKSIFSAVLDCTXALPXIDTQTPLQTQ

SEQ ID NO: 1416 - protein, 65 aa, Homo sapiens
  SITE (34): Xaa equals any of the naturally occurring L-amino acids
ICPQNPLNPLVNLTVSPKRNSSLDTRKKPCRESXKFNTHSRPKSSHQLRKRQAQHPLPKKSQTYN

SEQ ID NO: 1417 - protein, 22 aa, Homo sapiens
  SITE (4): Xaa equals any of the naturally occurring L-amino acids
  SITE (14): Xaa equals any of the naturally occurring L-amino acids
  SITE (20): Xaa equals any of the naturally occurring L-amino acids
DTSXGTGPMEMYRXFPILVXSL

SEQ ID NO: 1418 - protein, 54 aa, Homo sapiens
  SITE (19): Xaa equals any of the naturally occurring L-amino acids
  SITE (27): Xaa equals any of the naturally occurring L-amino acids
  SITE (31): Xaa equals any of the naturally occurring L-amino acids
  SITE (43): Xaa equals any of the naturally occurring L-amino acids
  SITE (45): Xaa equals any of the naturally occurring L-amino acids
  SITE (52): Xaa equals any of the naturally occurring L-amino acids
GIRIFCKWRHIQKKSLNGXIGMEWGKXFWKXIPILPGRLFEVXIXVPNKVNXFL

SEQ ID NO: 1419 - protein, 39 aa, Homo sapiens
QLLLSVRLHFAPYNYCFQISTCMCLSLKALVKSHILYSA

SEQ ID NO: 1420 - protein, 45 aa, Homo sapiens
  SITE (5): Xaa equals any of the naturally occurring L-amino acids
  SITE (37): Xaa equals any of the naturally occurring L-amino acids
  SITE (38): Xaa equals any of the naturally occurring L-amino acids
  SITE (39): Xaa equals any of the naturally occurring L-amino acids
  SITE (44): Xaa equals any of the naturally occurring L-amino acids
GGGAXPEGLSLLAPSARSRAGRALPAPGTVPGGEYDXXXTPVKXE

SEQ ID NO: 1421 - protein, 136 aa, Homo sapiens
AAAAAGDPGAMGRARDAILDALENLTAEELKKFKLKLLSVPLREGYGRIPRGALLSMDALDLTDKLVSFYLETYGAELTANVLRDMGLQEMAGQLQAATHQGSGAAPLGSRPLLSRQPSQACTLIDQHRASLSRRS

SEQ ID NO: 1422 - protein, 115 aa, Homo sapiens
  SITE (96): Xaa equals any of the naturally occurring L-amino acids
  SITE (111): Xaa equals any of the naturally occurring L-amino acids
GMTPFCGLKCDALQKHHSDGQLDSGVLRLCPLPTASLPHPSLQSHFSDRAIPKNTEGLECWLATLCLSGLPKAWKKEGPDCQGNLLIGLRRHWSLXCGAPQSCRSNALLAXLAWL

SEQ ID NO: 1423 - protein, 52 aa, Homo sapiens
  SITE (9): Xaa equals any of the naturally occurring L-amino acids
  SITE (43): Xaa equals any of the naturally occurring L-amino acids
  SITE (49): Xaa equals any of the naturally occurring L-amino acids
RAHPSIFAXIVGKIYRFEGEQTYRAWLISLFVPRLESLFPTFXFLPHQXPSF

SEQ ID NO: 1424 - protein, 53 aa, Homo sapiens
  SITE (38): Xaa equals any of the naturally occurring L-amino acids
  SITE (52): Xaa equals any of the naturally occurring L-amino acids
LCKGEPKLRPPKPDELPKKQLKEHTRLCSKIVGRFIGXGDKPTEPGDSWFPXE

SEQ ID NO: 1425 - protein, 23 aa, Homo sapiens
  SITE (7): Xaa equals any of the naturally occurring L-amino acids
  SITE (8): Xaa equals any of the naturally occurring L-amino acids
  SITE (11): Xaa equals any of the naturally occurring L-amino acids
  SITE (14): Xaa equals any of the naturally occurring L-amino acids
LFFFLNXXLHXFSXFQDGRCYGF

SEQ ID NO: 1426 - protein, 75 aa, Homo sapiens
  SITE (7): Xaa equals any of the naturally occurring L-amino acids
  SITE (12): Xaa equals any of the naturally occurring L-amino acids
  SITE (19): Xaa equals any of the naturally occurring L-amino acids
  SITE (21): Xaa equals any of the naturally occurring L-amino acids
  SITE (22): Xaa equals any of the naturally occurring L-amino acids
  SITE (25): Xaa equals any of the naturally occurring L-amino acids
  SITE (29): Xaa equals any of the naturally occurring L-amino acids
  SITE (32): Xaa equals any of the naturally occurring L-amino acids
  SITE (35): Xaa equals any of the naturally occurring L-amino acids
  SITE (36): Xaa equals any of the naturally occurring L-amino acids
  SITE (37): Xaa equals any of the naturally occurring L-amino acids
  SITE (43): Xaa equals any of the naturally occurring L-amino acids
  SITE (44): Xaa equals any of the naturally occurring L-amino acids
  SITE (47): Xaa equals any of the naturally occurring L-amino acids
  SITE (48): Xaa equals any of the naturally occurring L-amino acids
  SITE (52): Xaa equals any of the naturally occurring L-amino acids
  SITE (56): Xaa equals any of the naturally occurring L-amino acids
  SITE (63): Xaa equals any of the naturally occurring L-amino acids
  SITE (70): Xaa equals any of the naturally occurring L-amino acids
  SITE (72): Xaa equals any of the naturally occurring L-amino acids
  SITE (75): Xaa equals any of the naturally occurring L-amino acids
KGLEKQXRLKAXSSKPNQXSXXGQXVALXVPXQKXXXWEKGEXXGNXXLKLXLLGXIPPWKLXSFLGKRXKXQPX

SEQ ID NO: 1427 - protein, 174 aa, Homo sapiens
  SITE (59): Xaa equals any of the naturally occurring L-amino acids
  SITE (89): Xaa equals any of the naturally occurring L-amino acids
  SITE (119): Xaa equals any of the naturally occurring L-amino acids
  SITE (127): Xaa equals any of the naturally occurring L-amino acids
  SITE (149): Xaa equals any of the naturally occurring L-amino acids
  SITE (162): Xaa equals any of the naturally occurring L-amino acids
  SITE (172): Xaa equals any of the naturally occurring L-amino acids
PPCCCPTTPTCSRCGRCRGGWAAQLTGRRHSPRHAGSPRPARWPCKTASGPSPSCHAAXGDMGRVALKSRGAVGTDCGQEAWKVWCGCXCESECECAGRPQGQEAAAPRLKAMAAMDLXQGPRLHGXRTWNHDSGHWIWGQGHVDKTFXTVFFTKAEEPRMXPHAPPNNCPXLR

SEQ ID NO: 1428 - protein, 64 aa, Homo sapiens [sequence omitted]

SEQ ID NO: 1429 - protein, 120 aa, Homo sapiens
  SITE (2): Xaa equals any of the naturally occurring L-amino acids
  SITE (41): Xaa equals any of the naturally occurring L-amino acids
  SITE (45): Xaa equals any of the naturally occurring L-amino acids
  SITE (112): Xaa equals any of the naturally occurring L-amino acids
  SITE (118): Xaa equals any of the naturally occurring L-amino acids
DXGFRMAAPVRITVLCSKENDSTCSFSLVEVTLVSCWGGGXHFFXVSVESKMNNKAGSFFWNLRQFSTLVSTSRTMRLCCLGLCKPKIVPFKLEHFEITFITECNQRMIIEXALAGCXHF

SEQ ID NO: 1430 - protein, 54 aa, Homo sapiens
TCVTKKKMNVLKRVLGGWFNKETKMLWCLDLWLLKMSSQVKSLVCLHLIHFCTN

SEQ ID NO: 1431 - protein, 132 aa, Homo sapiens
  SITE (5): Xaa equals any of the naturally occurring L-amino acids
  SITE (6): Xaa equals any of the naturally occurring L-amino acids
  SITE (120): Xaa equals any of the naturally occurring L-amino acids
  SITE (126): Xaa equals any of the naturally occurring L-amino acids
  SITE (128): Xaa equals any of the naturally occurring L-amino acids
  SITE (131): Xaa equals any of the naturally occurring L-amino acids
  SITE (132): Xaa equals any of the naturally occurring L-amino acids
TVTVXXSRVRPSASGRVFMWTVSGTPCREFWSRFRKEKEPVVVETVEEKKEPILVCPPLRSRAYTPPEDLQSRLESYVKEVFGSSLPSNWQDISLEDSRLKFNLLAHLADDLGHVVPKLXTPPDVXGXRCXX

SEQ ID NO: 1432 - protein, 30 aa, Homo sapiens
  SITE (8): Xaa equals any of the naturally occurring L-amino acids
  SITE (10): Xaa equals any of the naturally occurring L-amino acids
  SITE (11): Xaa equals any of the naturally occurring L-amino acids
  SITE (22): Xaa equals any of the naturally occurring L-amino acids
SGTVKRHXRXXISGRPPAPPRXPREGPGAG

SEQ ID NO: 1433 - protein, 43 aa, Homo sapiens
  SITE (37): Xaa equals any of the naturally occurring L-amino acids
  SITE (38): Xaa equals any of the naturally occurring L-amino acids
  SITE (39): Xaa equals any of the naturally occurring L-amino acids
  SITE (41): Xaa equals any of the naturally occurring L-amino acids
TPLSQNPAQAERYGSAAEPRLASDSRSPRCPRRRAAXXXRXPP

SEQ ID NO: 1434 - protein, 47 aa, Homo sapiens
  SITE (31): Xaa equals any of the naturally occurring L-amino acids
  SITE (40): Xaa equals any of the naturally occurring L-amino acids
  SITE (43): Xaa equals any of the naturally occurring L-amino acids
LNASKSESRPGGTIRQRRGASDGSDSRSPAXPRRRAAPPXRAXRARE

SEQ ID NO: 1435 - protein, 51 aa, Homo sapiens
  SITE (17): Xaa equals any of the naturally occurring L-amino acids
  SITE (23): Xaa equals any of the naturally occurring L-amino acids
CLSFLYYHRYFPHSLAXACRMLXKSLINHWAKYTEGEASSIFKLVSKFFIA

SEQ ID NO: 1436 - protein, 96 aa, Homo sapiens
  SITE (53): Xaa equals any of the naturally occurring L-amino acids
  SITE (73): Xaa equals any of the naturally occurring L-amino acids
  SITE (80): Xaa equals any of the naturally occurring L-amino acids
  SITE (83): Xaa equals any of the naturally occurring L-amino acids
  SITE (89): Xaa equals any of the naturally occurring L-amino acids
  SITE (90): Xaa equals any of the naturally occurring L-amino acids
EQLKEHTRLCSKIVGRFIGRGDKPTEPGDSWVVQDRILSSTLNLPQNPLNPLXNLTGSPKRNSSLDTRKKPCXESKKINXHSXPKSSTXXKAVKLT

SEQ ID NO: 1437 - protein, 58 aa, Homo sapiens; identical to SEQ ID NO: 1372

SEQ ID NO: 1438 - protein, 121 aa, Homo sapiens
  SITE (108): Xaa equals any of the naturally occurring L-amino acids
DGGSSVQSEAEASVDPSLSWGQRKKLYYDTDYGSKSRGRQSQQEAEEEEREEEEEAQIIQRRLAQALQEDDFGVAWVEAFAKPVPQVDEAETRVVKDLAKGSVERKTXKCCKRNHQNSWSL

SEQ ID NO: 1439 - protein, 78 aa, Homo sapiens
  SITE (71): Xaa equals any of the naturally occurring L-amino acids
  SITE (72): Xaa equals any of the naturally occurring L-amino acids
LLNILEFFYSWYLKKKKKRAAALEDPSRGPSFTRACDVHSSLPIVSRIIKLGTGRAVYNVRGLGRSASLGXXVEGTLL

SEQ ID NO: 1440 - protein, 121 aa, Homo sapiens
  SITE (24): Xaa equals any of the naturally occurring L-amino acids
  SITE (26): Xaa equals any of the naturally occurring L-amino acids
  SITE (87): Xaa equals any of the naturally occurring L-amino acids
  SITE (101): Xaa equals any of the naturally occurring L-amino acids
  SITE (105): Xaa equals any of the naturally occurring L-amino acids
LCAFSAPFSGCPTLPLHAAWAARXRXPTGSKCAFLRALPESSTAHPVAPCLAWPGLPGPSLPMLLHVLIFLFGPLLPPLAVLPLGLXPSCLNLGKVLSLWXSSSXPRVLEPGLFPTGPTLT

SEQ ID NO: 1441 - protein, 121 aa, Homo sapiens
  SITE (2): Xaa equals any of the naturally occurring L-amino acids
  SITE (57): Xaa equals any of the naturally occurring L-amino acids
  SITE (79): Xaa equals any of the naturally occurring L-amino acids
  SITE (81): Xaa equals any of the naturally occurring L-amino acids
  SITE (109): Xaa equals any of the naturally occurring L-amino acids
  SITE (110): Xaa equals any of the naturally occurring L-amino acids
  SITE (117): Xaa equals any of the naturally occurring L-amino acids
  SITE (119): Xaa equals any of the naturally occurring L-amino acids
  SITE (120): Xaa equals any of the naturally occurring L-amino acids
QXISAPWGLEQNWQRGKRSLRASVTQDLPPACPSPARLLENGHCAQPGPWAAQAGVXHGPGPPSLPLLRPPAFRQAKAXFXPTRPPQGASGAQVGPSFNLPVVVVGALXXPQRSHFXGXXW

SEQ ID NO: 1442 - protein, 37 aa, Homo sapiens
EQLKEHTRLCSKIVGRFIGRGDKPTEPGDSWLSKIES

SEQ ID NO: 1443 - protein, 61 aa, Homo sapiens
  SITE (4): Xaa equals any of the naturally occurring L-amino acids
  SITE (13): Xaa equals any of the naturally occurring L-amino acids
  SITE (26): Xaa equals any of the naturally occurring L-amino acids
  SITE (33): Xaa equals any of the naturally occurring L-amino acids
  SITE (34): Xaa equals any of the naturally occurring L-amino acids
  SITE (47): Xaa equals any of the naturally occurring L-amino acids
  SITE (49): Xaa equals any of the naturally occurring L-amino acids
  SITE (50): Xaa equals any of the naturally occurring L-amino acids
  SITE (52): Xaa equals any of the naturally occurring L-amino acids
  SITE (53): Xaa equals any of the naturally occurring L-amino acids
AKPXPKPTPPYYXTTLAKPFTQIKYXRYKLKPXXIHILPPGKHEKLXPXXIXXGLTPIPSA

SEQ ID NO: 1444 - protein, 35 aa, Homo sapiens
NAYVNFFLFLSIHPNKKITGKPMFLRCHYSKQNKR

SEQ ID NO: 1445 - protein, 79 aa, Homo sapiens
  SITE (21): Xaa equals any of the naturally occurring L-amino acids
  SITE (25): Xaa equals any of the naturally occurring L-amino acids
  SITE (38): Xaa equals any of the naturally occurring L-amino acids
  SITE (56): Xaa equals any of the naturally occurring L-amino acids
  SITE (57): Xaa equals any of the naturally occurring L-amino acids
  SITE (70): Xaa equals any of the naturally occurring L-amino acids
  SITE (71): Xaa equals any of the naturally occurring L-amino acids
  SITE (76): Xaa equals any of the naturally occurring L-amino acids
  SITE (79): Xaa equals any of the naturally occurring L-amino acids
GRGSSGLMLGCRSAPVATPPXQPGXLGARLGVLTGVGXTPNSKSLRKREVEGEASXXIKAPIRSKKKKKXXGGGPXPNX

SEQ ID NO: 1446 - protein, 104 aa, Homo sapiens
FACSRRGVALISAMSSQKGNVARSRPQKHQNTFSFKNDKFDKSVQTKKINAKLHDGVCQRCKEVLEWRVKYSKYKPLSKPKKCVKCLQKTVKDSYHVMCRPCAL

SEQ ID NO: 1447 - protein, 34 aa, Homo sapiens
  SITE (4): Xaa equals any of the naturally occurring L-amino acids
  SITE (6): Xaa equals any of the naturally occurring L-amino acids
  SITE (31): Xaa equals any of the naturally occurring L-amino acids
YPRXLXCHRVAQACPATPRITLWPSASGMSXRWS

SEQ ID NO: 1448 - protein, 80 aa, Homo sapiens
  SITE (2): Xaa equals any of the naturally occurring L-amino acids
  SITE (3): Xaa equals any of the naturally occurring L-amino acids
  SITE (6): Xaa equals any of the naturally occurring L-amino acids
  SITE (9): Xaa equals any of the naturally occurring L-amino acids
  SITE (15): Xaa equals any of the naturally occurring L-amino acids
  SITE (16): Xaa equals any of the naturally occurring L-amino acids
  SITE (22): Xaa equals any of the naturally occurring L-amino acids
  SITE (26): Xaa equals any of the naturally occurring L-amino acids
  SITE (39): Xaa equals any of the naturally occurring L-amino acids
  SITE (59): Xaa equals any of the naturally occurring L-amino acids
  SITE (64): Xaa equals any of the naturally occurring L-amino acids
  SITE (65): Xaa equals any of the naturally occurring L-amino acids
  SITE (68): Xaa equals any of the naturally occurring L-amino acids
  SITE (78): Xaa equals any of the naturally occurring L-amino acids
HXXNPXSNXKYHRHXXHKEYKXHHPXAWENVVENLHLYXILKMKLGVVVHTCGPSLLGXLQPGXXAPXQGLVAAMSSXLA

SEQ ID NO: 1449 - protein, 110 aa, Homo sapiens
  SITE (34): Xaa equals any of the naturally occurring L-amino acids
  SITE (102): Xaa equals any of the naturally occurring L-amino acids
  SITE (108): Xaa equals any of the naturally occurring L-amino acids
GTVYLELRGFPRTMGMAKNKLVKSDPGTQQLILXFFLSLSRVFFPPWAGMHTAAALVSGQADGLGASPRGVAGAEDPPRRTPASSAGQRQAGRAFRGARAFXQACSPXCS

SEQ ID NO: 1450 - protein, 111 aa, Homo sapiens
  SITE (1): Xaa equals any of the naturally occurring L-amino acids
  SITE (13): Xaa equals any of the naturally occurring L-amino acids
  SITE (14): Xaa equals any of the naturally occurring L-amino acids
  SITE (33): Xaa equals any of the naturally occurring L-amino acids
  SITE (66): Xaa equals any of the naturally occurring L-amino acids
  SITE (96): Xaa equals any of the naturally occurring L-amino acids
  SITE (97): Xaa equals any of the naturally occurring L-amino acids
XSAEHFHRLPRRXXQLRDVHHGWAPRGERRPTXAVPVREREGFRGVRRRTLGPPAAVYRASHLLSXFPLSRSKNTKLGTPSAPPPRLPGPIHNFNXXPGSPSFRGGLGRGC

SEQ ID NO: 1451 - protein, 40 aa, Homo sapiens
  SITE (1): Xaa equals any of the naturally occurring L-amino acids
  SITE (13): Xaa equals any of the naturally occurring L-amino acids
  SITE (32): Xaa equals any of the naturally occurring L-amino acids
  SITE (34): Xaa equals any of the naturally occurring L-amino acids
  SITE (35): Xaa equals any of the naturally occurring L-amino acids
  SITE (38): Xaa equals any of the naturally occurring L-amino acids
XKLWSFCLVALKXFCAIMQQYGGKILWKNGDXLXXPQXIK

SEQ ID NO: 1452 - protein, 40 aa, Homo sapiens
  SITE (17): Xaa equals any of the naturally occurring L-amino acids
  SITE (19): Xaa equals any of the naturally occurring L-amino acids
  SITE (21): Xaa equals any of the naturally occurring L-amino acids
  SITE (34): Xaa equals any of the naturally occurring L-amino acids
  SITE (36): Xaa equals any of the naturally occurring L-amino acids
TSSGTRDLPLGWPARRXRXGXPGSTHASAILLEXIXLSPP

SEQ ID NO: 1453 - protein, 67 aa, Homo sapiens
  SITE (1): Xaa equals any of the naturally occurring L-amino acids
  SITE (43): Xaa equals any of the naturally occurring L-amino acids
  SITE (45): Xaa equals any of the naturally occurring L-amino acids
  SITE (59): Xaa equals any of the naturally occurring L-amino acids
  SITE (67): Xaa equals any of the naturally occurring L-amino acids
XSATQEVRILLASAGCCFFSGSGTGRGPVVYLTQMGDEKVLLXKXKTLDGNSSGKRNEXRNKRRKQX

SEQ ID NO: 1454 - protein, 44 aa, Homo sapiens
NSEHSTHVWHFKVKTSVTSRTKEIVSYTFIFMNSFIFLFNDSLF

SEQ ID NO: 1455 - protein, 39 aa, Homo sapiens
  SITE (18): Xaa equals any of the naturally occurring L-amino acids
  SITE (19): Xaa equals any of the naturally occurring L-amino acids
  SITE (20): Xaa equals any of the naturally occurring L-amino acids
  SITE (21): Xaa equals any of the naturally occurring L-amino acids
  SITE (34): Xaa equals any of the naturally occurring L-amino acids
TSTSWCVSLTGVEDQTGXXXXCSERVRSYWIIIXLNPKQ

SEQ ID NO: 1456 - protein, 149 aa, Homo sapiens
  SITE (54): Xaa equals any of the naturally occurring L-amino acids
  SITE (81): Xaa equals any of the naturally occurring L-amino acids
  SITE (104): Xaa equals any of the naturally occurring L-amino acids
  SITE (112): Xaa equals any of the naturally occurring L-amino acids
  SITE (113): Xaa equals any of the naturally occurring L-amino acids
  SITE (121): Xaa equals any of the naturally occurring L-amino acids
  SITE (122): Xaa equals any of the naturally occurring L-amino acids
  SITE (125): Xaa equals any of the naturally occurring L-amino acids
  SITE (126): Xaa equals any of the naturally occurring L-amino acids
  SITE (137): Xaa equals any of the naturally occurring L-amino acids
  SITE (148): Xaa equals any of the naturally occurring L-amino acids
SPPPPGLALPGGYDWSHWSRRIPASSVAASTSLSRPRPAPRRLLWVRPPRGAAXSQAAGQARLKSLQWLTNLSLSVLTWPXIDYGRLGVNSIPTIKVISQSPLXQATVMSSXXFGGIAHTXXTEXXRNDTNMSQSFXGNLDPWNVFSXW

SEQ ID NO: 1457 - protein, 140 aa, Homo sapiens
  SITE (117): Xaa equals any of the naturally occurring L-amino acids
  SITE (124): Xaa equals any of the naturally occurring L-amino acids
  SITE (135): Xaa equals any of the naturally occurring L-amino acids
  SITE (138): Xaa equals any of the naturally occurring L-amino acids
EAAALGLSQPSGCWCCHPPALSLWHFPPLRPWRALPVGLAAPQNLGPSSSIGFSPGFHLLPRAQPLTCFIGHSGCSLTQWLVGRGVTEGSQGPVGVPGQKNWLQLPVWSRVFRVNVXNFKGHSXNQLGVKSLRMXNLXGR

SEQ ID NO: 1458 - protein, 41 aa, Homo sapiens
  SITE (8): Xaa equals any of the naturally occurring L-amino acids
  SITE (11): Xaa equals any of the naturally occurring L-amino acids
  SITE (12): Xaa equals any of the naturally occurring L-amino acids
  SITE (35): Xaa equals any of the naturally occurring L-amino acids
PPRCSRSXTSXXPGCRNSARACKTAGCTASSKPRXSEQILR

SEQ ID NO: 1459 - protein, 56 aa, Homo sapiens
  SITE (29): Xaa equals any of the naturally occurring L-amino acids
  SITE (41): Xaa equals any of the naturally occurring L-amino acids
RVFFFFFFFLDGIFNLFIMFVSYRHLCFXQQFIIVTSHTSXITTERTLKYKERLQK

SEQ ID NO: 1460 - protein, 56 aa, Homo sapiens
PQNPLNPLVNLTVSPKRNSSLDTRKKPCRESKKFNTHSRPKSSHQLRKRSSSTPTT

SEQ ID NO: 1461 - protein, 124 aa, Homo sapiens
  SITE (9): Xaa equals any of the naturally occurring L-amino acids
  SITE (47): Xaa equals any of the naturally occurring L-amino acids
  SITE (50): Xaa equals any of the naturally occurring L-amino acids
  SITE (51): Xaa equals any of the naturally occurring L-amino acids
  SITE (52): Xaa equals any of the naturally occurring L-amino acids
  SITE (53): Xaa equals any of the naturally occurring L-amino acids
  SITE (54): Xaa equals any of the naturally occurring L-amino acids
  SITE (55): Xaa equals any of the naturally occurring L-amino acids
  SITE (56): Xaa equals any of the naturally occurring L-amino acids
  SITE (57): Xaa equals any of the naturally occurring L-amino acids
  SITE (59): Xaa equals any of the naturally occurring L-amino acids
  SITE (60): Xaa equals any of the naturally occurring L-amino acids
  SITE (65): Xaa equals any of the naturally occurring L-amino acids
  SITE (69): Xaa equals any of the naturally occurring L-amino acids
  SITE (75): Xaa equals any of the naturally occurring L-amino acids
  SITE (82): Xaa equals any of the naturally occurring L-amino acids
  SITE (88): Xaa equals any of the naturally occurring L-amino acids
  SITE (98): Xaa equals any of the naturally occurring L-amino acids
  SITE (103): Xaa equals any of the naturally occurring L-amino acids
  SITE (104): Xaa equals any of the naturally occurring L-amino acids
  SITE (106): Xaa equals any of the naturally occurring L-amino acids
  SITE (113): Xaa equals any of the naturally occurring L-amino acids
  SITE (121): Xaa equals any of the naturally occurring L-amino acids
  SITE (123): Xaa equals any of the naturally occurring L-amino acids
GFRENKLKXIKFVKSNYIYIKKPICIRQKLFLFISVRYPLNKYFSGXKKXXXXXXXXNXXKGGRXKGSXLTFACXQRHTSPXLSPNFXPLAVFLQPSXLGKSXXVXQLKPPCXYIPFSPAXRXF

SEQ ID NO: 1462 - protein, 51 aa, Homo sapiens
  SITE (51): Xaa equals any of the naturally occurring L-amino acids
HEAAPEFGRKIEAEDVEGSCGGGSDASGTKLRNSLTDPVPRERGSPQALLX

SEQ ID NO: 1463 - protein, 80 aa, Homo sapiens
  SITE (2): Xaa equals any of the naturally occurring L-amino acids
  SITE (11): Xaa equals any of the naturally occurring L-amino acids
  SITE (14): Xaa equals any of the naturally occurring L-amino acids
  SITE (35): Xaa equals any of the naturally occurring L-amino acids
  SITE (46): Xaa equals any of the naturally occurring L-amino acids
  SITE (61): Xaa equals any of the naturally occurring L-amino acids
  SITE (74): Xaa equals any of the naturally occurring L-amino acids
HXFATVMDVYXNPXRVCLPALHPKAHLLPPLHLRXKTLQTADTRKXNSQLCLMLLVSSTSXQNRYHAEFRGPCXSKSLLF

SEQ ID NO: 1464 - protein, 81 aa, Homo sapiens
  SITE (11): Xaa equals any of the naturally occurring L-amino acids
  SITE (23): Xaa equals any of the naturally occurring L-amino acids
  SITE (24): Xaa equals any of the naturally occurring L-amino acids
  SITE (40): Xaa equals any of the naturally occurring L-amino acids
  SITE (41): Xaa equals any of the naturally occurring L-amino acids
  SITE (48): Xaa equals any of the naturally occurring L-amino acids
  SITE (53): Xaa equals any of the naturally occurring L-amino acids
  SITE (57): Xaa equals any of the naturally occurring L-amino acids
  SITE (59): Xaa equals any of the naturally occurring L-amino acids
  SITE (60): Xaa equals any of the naturally occurring L-amino acids
  SITE (61): Xaa equals any of the naturally occurring L-amino acids
  SITE (65): Xaa equals any of the naturally occurring L-amino acids
  SITE (73): Xaa equals any of the naturally occurring L-amino acids
  SITE (74): Xaa equals any of the naturally occurring L-amino acids
  SITE (75): Xaa equals any of the naturally occurring L-amino acids
  SITE (80): Xaa equals any of the naturally occurring L-amino acids
VFLCLCASAMXKNTRQTTMRINXXDALCTPHSHEPKKIFXXFLMKEKXCPLWXLPPXFXXXILFXLPPPKNPXXXCFLAXP

SEQ ID NO: 1465 - protein, 34 aa, Homo sapiens
  SITE (13): Xaa equals any of the naturally occurring L-amino acids
  SITE (25): Xaa equals any of the naturally occurring L-amino acids
  SITE (33): Xaa equals any of the naturally occurring L-amino acids
  SITE (34): Xaa equals any of the naturally occurring L-amino acids
IQLGEPAGLVRQXLGLCQQQEVKRXTLPPSPPXX

SEQ ID NO: 1466 - protein, 151 aa, Homo sapiens
  SITE (5): Xaa equals any of the naturally occurring L-amino acids
  SITE (7): Xaa equals any of the naturally occurring L-amino acids
  SITE (14): Xaa equals any of the naturally occurring L-amino acids
  SITE (15): Xaa equals any of the naturally occurring L-amino acids
  SITE (21): Xaa equals any of the naturally occurring L-amino acids
  SITE (41): Xaa equals any of the naturally occurring L-amino acids
  SITE (46): Xaa equals any of the naturally occurring L-amino acids
  SITE (56): Xaa equals any of the naturally occurring L-amino acids
  SITE (58): Xaa equals any of the naturally occurring L-amino acids
  SITE (62): Xaa equals any of the naturally occurring L-amino acids
  SITE (64): Xaa equals any of the naturally occurring L-amino acids
  SITE (82): Xaa equals any of the naturally occurring L-amino acids
  SITE (85): Xaa equals any of the naturally occurring L-amino acids
  SITE (92): Xaa equals any of the naturally occurring L-amino acids
  SITE (94): Xaa equals any of the naturally occurring L-amino acids
  SITE (97): Xaa equals any of the naturally occurring L-amino acids
  SITE (101): Xaa equals any of the naturally occurring L-amino acids
  SITE (105): Xaa equals any of the naturally occurring L-amino acids
  SITE (106): Xaa equals any of the naturally occurring L-amino acids
  SITE (112): Xaa equals any of the naturally occurring L-amino acids
  SITE (113): Xaa equals any of the naturally occurring L-amino acids
  SITE (118): Xaa equals any of the naturally occurring L-amino acids
  SITE (127): Xaa equals any of the naturally occurring L-amino acids
  SITE (130): Xaa equals any of the naturally occurring L-amino acids
  SITE (135): Xaa equals any of the naturally occurring L-amino acids
  SITE (142): Xaa equals any of the naturally occurring L-amino acids
TVLPXMXSPMGHPXXFPKPPXKHTWSQSLLPPALPLNWKQXCARWXGLPGRQPLPXSXAKPXAXERLLLRCPCPGLLTLATXTYXALGLQPXPXLHXCWPXRLLXXSIDLVXXKSHWXSWHWRVLVXGLXSEACXRVSLNSXMHALGLSCS

SEQ ID NO: 1467 - protein, 34 aa, Homo sapiens
  SITE (4): Xaa equals any of the naturally occurring L-amino acids
  SITE (18): Xaa equals any of the naturally occurring L-amino acids
  SITE (26): Xaa equals any of the naturally occurring L-amino acids
  SITE (31): Xaa equals any of the naturally occurring L-amino acids
  SITE (33): Xaa equals any of the naturally occurring L-amino acids
GNLXGGCQNLNKKMAPTXHSQTPLWXLALKXKXR

SEQ ID NO: 1468 - protein, 40 aa, Homo sapiens
  SITE (21): Xaa equals any of the naturally occurring L-amino acids
  SITE (22): Xaa equals any of the naturally occurring L-amino acids
  SITE (39): Xaa equals any of the naturally occurring L-amino acids
HVLMLAADLNTLKVLCRKKKXXRAAALEDPSLRTRACDXI

SEQ ID NO: 1469 - protein, 30 aa, Homo sapiens
  SITE (14): Xaa equals any of the naturally occurring L-amino acids
  SITE (17): Xaa equals any of the naturally occurring L-amino acids
  SITE (23): Xaa equals any of the naturally occurring L-amino acids
ALCFKRLTGNYIWXTFXALTLKXLKIQVDK

SEQ ID NO: 1470 - protein, 87 aa, Homo sapiens
  SITE (14): Xaa equals any of the naturally occurring L-amino acids
  SITE (70): Xaa equals any of the naturally occurring L-amino acids
  SITE (75): Xaa equals any of the naturally occurring L-amino acids
  SITE (79): Xaa equals any of the naturally occurring L-amino acids
  SITE (84): Xaa equals any of the naturally occurring L-amino acids
TSPSRKCEEPQAHXCSSAPSLTFSPGQVCICSLHWHFYFQPLGSCFCLLLRNLSPWGSFTTPSNIGSQRXTREGXFPRXGPNFXREF

SEQ ID NO: 1471 - protein, 65 aa, Homo sapiens
  SITE (47): Xaa equals any of the naturally occurring L-amino acids
GAEDGGCSICVVLLSTLLCLAPDSALCSLAQQLCLHIIFMVLLCNSXLRWVATVQIFITLFRLSE

SEQ ID NO: 1472 - protein, 68 aa, Homo sapiens
TPINLTTSCSAYIPPSSANPDEGYKVSASTHVKTLGQGVAHEVARNGLHFLPQKTTIALMKLKGRRWI

SEQ ID NO: 1473 - protein, 132 aa, Homo sapiens
  SITE (1): Xaa equals any of the naturally occurring L-amino acids
  SITE (7): Xaa equals any of the naturally occurring L-amino acids
  SITE (10): Xaa equals any of the naturally occurring L-amino acids
  SITE (17): Xaa equals any of the naturally occurring L-amino acids
  SITE (19): Xaa equals any of the naturally occurring L-amino acids
  SITE (30): Xaa equals any of the naturally occurring L-amino acids
  SITE (38): Xaa equals any of the naturally occurring L-amino acids
  SITE (40): Xaa equals any of the naturally occurring L-amino acids
  SITE (46): Xaa equals any of the naturally occurring L-amino acids
  SITE (47): Xaa equals any of the naturally occurring L-amino acids
  SITE (51): Xaa equals any of the naturally occurring L-amino acids
  SITE (52): Xaa equals any of the naturally occurring L-amino acids
  SITE (55): Xaa equals any of the naturally occurring L-amino acids
  SITE (57): Xaa equals any of the naturally occurring L-amino acids
  SITE (63): Xaa equals any of the naturally occurring L-amino acids
  SITE (64): Xaa equals any of the naturally occurring L-amino acids
  SITE (68): Xaa equals any of the naturally occurring L-amino acids
  SITE (70): Xaa equals any of the naturally occurring L-amino acids
  SITE (85): Xaa equals any of the naturally occurring L-amino acids
  SITE (89): Xaa equals any of the naturally occurring L-amino acids
  SITE (92): Xaa equals any of the naturally occurring L-amino acids
  SITE (104): Xaa equals any of the naturally occurring L-amino acids
  SITE (107): Xaa equals any of the naturally occurring L-amino acids
  SITE (117): Xaa equals any of the naturally occurring L-amino acids
XGGGGEXFFXPPSRGGXLXFGVNKPLPPGXPRGSPGKXFXPGGFRXXLIAXXPGXFXPKKNKXXFPFXPXLTWAAFAQKGFGGGXKGQXPLXLETGEKLQLWHXALXVVPTCKRGQXGGNLNLPSKKKLAKY

SEQ ID NO: 1474 - protein, 32 aa, Homo sapiens
  SITE (25): Xaa equals any of the naturally occurring L-amino acids
  SITE (30): Xaa equals any of the naturally occurring L-amino acids
  SITE (31): Xaa equals any of the naturally occurring L-amino acids
IIMAKKSSLRNKVPFSEKKKKKKKXGGPFXXT

SEQ ID NO: 1475 - protein, 51 aa, Homo sapiens
YVALLNITLRTRRLETTNPNYVIGKCRIKRPMYISTDHWAIMLLLRLYAVL

SEQ ID NO: 1476 - protein, 70 aa, Homo sapiens
  SITE (18): Xaa equals any of the naturally occurring L-amino acids
  SITE (50): Xaa equals any of the naturally occurring L-amino acids
  SITE (54): Xaa equals any of the naturally occurring L-amino acids
TFLSGGEVVNGGGCACVXARVIWEFSVPSVQFCYEPKTALKNNLCFKKVXVLYXLLLEIFVAIFTWKNTG

SEQ ID NO: 1477 - protein, 90 aa, Homo sapiens
  SITE (53): Xaa equals any of the naturally occurring L-amino acids
  SITE (76): Xaa equals any of the naturally occurring L-amino acids
  SITE (87): Xaa equals any of the naturally occurring L-amino acids
HRTPVPARGGARALPRARGAWRGGRPAGGDRRGTGYPRPTEAPRRCRIVPPGXDSDLEAFSHNPTDGSFAPLAPQXSTYTKCLNLRXLSY

SEQ ID NO: 1478 - protein, 70 aa, Homo sapiens [sequence omitted]

SEQ ID NO: 1479 - protein, 59 aa, Homo sapiens
  SITE (10): Xaa equals any of the naturally occurring L-amino acids
  SITE (15): Xaa equals any of the naturally occurring L-amino acids
  SITE (21): Xaa equals any of the naturally occurring L-amino acids
  SITE (27): Xaa equals any of the naturally occurring L-amino acids
  SITE (32): Xaa equals any of the naturally occurring L-amino acids
  SITE (44): Xaa equals any of the naturally occurring L-amino acids
  SITE (52): Xaa equals any of the naturally occurring L-amino acids
PVPPSSSARXGGGGXRRGRGXVPPAGXAPGAXVPAAPRLGRRLXADLELVRXRGIRLFN

SEQ ID NO: 1480 - protein, 99 aa, Homo sapiens
  SITE (21): Xaa equals any of the naturally occurring L-amino acids
  SITE (35): Xaa equals any of the naturally occurring L-amino acids
  SITE (38): Xaa equals any of the naturally occurring L-amino acids
  SITE (54): Xaa equals any of the naturally occurring L-amino acids
  SITE (57): Xaa equals any of the naturally occurring L-amino acids
  SITE (76): Xaa equals any of the naturally occurring L-amino acids
  SITE (79): Xaa equals any of the naturally occurring L-amino acids
  SITE (84): Xaa equals any of the naturally occurring L-amino acids
  SITE (86): Xaa equals any of the naturally occurring L-amino acids
  SITE (91): Xaa equals any of the naturally occurring L-amino acids
LHPRPGLDVMGCGPLPAEPIXRQVRAALQTFAHLXASXPKVPGQPEAPRPQPRXPQXFESGAHSRSPLALPTPARXGGXSCPRXRXAPENXTPPLRRTN

SEQ ID NO: 1481 - protein, 41 aa, Homo sapiens
  SITE (7): Xaa equals any of the naturally occurring L-amino acids
  SITE (14): Xaa equals any of the naturally occurring L-amino acids
SPSLIRXPIGKAEXACRYRVREFPGRPTRPITSCRPPNINL

SEQ ID NO: 1482 - protein, 99 aa, Homo sapiens
  SITE (3): Xaa equals any of the naturally occurring L-amino acids
  SITE (20): Xaa equals any of the naturally occurring L-amino acids
  SITE (25): Xaa equals any of the naturally occurring L-amino acids
  SITE (27): Xaa equals any of the naturally occurring L-amino acids
  SITE (95): Xaa equals any of the naturally occurring L-amino acids
PRXREIPGGRTHAFREKACXKQGEXRXEKGGLVISKSLERWEWTKKMGTPPLFQAWEGVLNGRDFLFPATKRLFTTYPVKSKFIFQEFNMYFSWXYLCQ

SEQ ID NO: 1483 - protein, 49 aa, Homo sapiens
CNSVSFRFLSCFCKLWERLTMQMCQRHTVGCNINNFKCKFLWINYFYIL

SEQ ID NO: 1484 - protein, 51 aa, Homo sapiens
CKQYLTNPQVLNYQTCIKNFGWGDLGAEPNLRAVHAKTSPVKANYYTQLIQ

SEQ ID NO: 1485 - protein, 22 aa, Homo sapiens
  SITE (7): Xaa equals any of the naturally occurring L-amino acids
  SITE (12): Xaa equals any of the naturally occurring L-amino acids
  SITE (13): Xaa equals any of the naturally occurring L-amino acids
  SITE (14): Xaa equals any of the naturally occurring L-amino acids
  SITE (22): Xaa equals any of the naturally occurring L-amino acids
LSLLHEXPHVGXXXFDILVPRX

SEQ ID NO: 1486 - protein, 126 aa, Homo sapiens
  SITE (112): Xaa equals any of the naturally occurring L-amino acids
EQTCFLNLVIFVKNCLDSFSHQRESTSSESASAPCSLLLRGRVTSHWQASGIVCEALQRAAPGSCLYKNILLPAALSLALHFGHDIRCVFIQLVVKMLLLNGSAYLCLHGLXEVGFHGHSVSTDLE

SEQ ID NO: 1487 - protein, 51 aa, Homo sapiens
  SITE (14): Xaa equals any of the naturally occurring L-amino acids
  SITE (30): Xaa equals any of the naturally occurring L-amino acids
  SITE (32): Xaa equals any of the naturally occurring L-amino acids
  SITE (37): Xaa equals any of the naturally occurring L-amino acids
  SITE (41): Xaa equals any of the naturally occurring L-amino acids
  SITE (48): Xaa equals any of the naturally occurring L-amino acids
VEATNLPEPGDSWXVQDKNLSSTFKFWPTXPXKFPWXINRXVQEGPGXGTP

SEQ ID NO: 1488 - protein, 37 aa, Homo sapiens; identical to SEQ ID NO: 1442

SEQ ID NO: 1489 - protein, 26 aa, Homo sapiens
  SITE (5): Xaa equals any of the naturally occurring L-amino acids
  SITE (13): Xaa equals any of the naturally occurring L-amino acids
  SITE (25): Xaa equals any of the naturally occurring L-amino acids
  SITE (26): Xaa equals any of the naturally occurring L-amino acids
GGMRXSHLQLLSXERTLGTEKNRGXX

SEQ ID NO: 1490 - protein, 39 aa, Homo sapiens
  SITE (5): Xaa equals any of the naturally occurring L-amino acids
  SITE (8): Xaa equals any of the naturally occurring L-amino acids
  SITE (12): Xaa equals any of the naturally occurring L-amino acids
  SITE (28): Xaa equals any of the naturally occurring L-amino acids
  SITE (35): Xaa equals any of the naturally occurring L-amino acids
  SITE (37): Xaa equals any of the naturally occurring L-amino acids
SFLIXSFXIKRXRNLMTGRHSFKTYSQXPITAQNXIXCL

SEQ ID NO: 1491 - protein, 55 aa, Homo sapiens
TLAYFVIDYKQIEEITISHFCIFSKIILLQSSIYCVPLIFYCESKEFHQNILNYE

SEQ ID NO: 1492 - protein, 37 aa, Homo sapiens; identical to SEQ ID NO: 1442

SEQ ID NO: 1493 - protein, 58 aa, Homo sapiens
  SITE (4): Xaa equals any of the naturally occurring L-amino acids
ICPXNPLNPLVNLTVSPKRNSSLDTRKKPCRESKKFNTHSRPKSSHQLRKRSSSTPTT

SEQ ID NO: 1494 - protein, 95 aa, Homo sapiens
  SITE (91): Xaa equals any of the naturally occurring L-amino acids
  SITE (93): Xaa equals any of the naturally occurring L-amino acids
  SITE (94): Xaa equals any of the naturally occurring L-amino acids
  SITE (95): Xaa equals any of the naturally occurring L-amino acids
ESWLCSGGGMQGHLLKEGHGQNNIEFPAPLGSDLLDTEPPFKMGQGKGGSVQSPDLELPEAIAALFTSKGPVLRLFVLIYFKLGKAGGRVXPXXX

SEQ ID NO: 1495 - protein, 67 aa, Homo sapiens
  SITE (16): Xaa equals any of the naturally occurring L-amino acids
  SITE (18): Xaa equals any of the naturally occurring L-amino acids
  SITE (21): Xaa equals any of the naturally occurring L-amino acids
  SITE (22): Xaa equals any of the naturally occurring L-amino acids
  SITE (46): Xaa equals any of the naturally occurring L-amino acids
  SITE (55): Xaa equals any of the naturally occurring L-amino acids
  SITE (59): Xaa equals any of the naturally occurring L-amino acids
  SITE (61): Xaa equals any of the naturally occurring L-amino acids
  SITE (67): Xaa equals any of the naturally occurring L-amino acids
LAPQAGVPPHSAPRPXSXLSXXPGPAPVPPRPRSAGPPWSAGLDRXGGAWLLVAXRALXQXLSSDLX

SEQ ID NO: 1496 - protein, 76 aa, Homo sapiens
  SITE (13): Xaa equals any of the naturally occurring L-amino acids
  SITE (14): Xaa equals any of the naturally occurring L-amino acids
  SITE (16): Xaa equals any of the naturally occurring L-amino acids
  SITE (22): Xaa equals any of the naturally occurring L-amino acids
  SITE (24): Xaa equals any of the naturally occurring L-amino acids
  SITE (31): Xaa equals any of the naturally occurring L-amino acids
  SITE (37): Xaa equals any of the naturally occurring L-amino acids
  SITE (41): Xaa equals any of the naturally occurring L-amino acids
  SITE (51): Xaa equals any of the naturally occurring L-amino acids
  SITE (67): Xaa equals any of the naturally occurring L-amino acids
ENPSKVNSPALGXXSXASWRLXVXLISGNPXQICSYXSRRXIGSVYCDGNXNVTVKRFAFCGLGRAXNFLLRLSLH

SEQ ID NO: 1497 - protein, 103 aa, Homo sapiens
  SITE (50): Xaa equals any of the naturally occurring L-amino acids
  SITE (57): Xaa equals any of the naturally occurring L-amino acids
  SITE (68): Xaa equals any of the naturally occurring L-amino acids
  SITE (72): Xaa equals any of the naturally occurring L-amino acids
  SITE (80): Xaa equals any of the naturally occurring L-amino acids
  SITE (83): Xaa equals any of the naturally occurring L-amino acids
  SITE (99): Xaa equals any of the naturally occurring L-amino acids
LPRCAPGSQAPPEGPWPRRIRRVRPGPRVRQPRRPSASLRPSRARPGRSXFPRPPPXRLPAASRVGAXRGLXPLLKFESXNQXVRNPEIPDPLRKMFSXEGER

SEQ ID NO: 1498 - protein, 32 aa, Homo sapiens
  SITE (3): Xaa equals any of the naturally occurring L-amino acids
  SITE (16): Xaa equals any of the naturally occurring L-amino acids
  SITE (30): Xaa equals any of the naturally occurring L-amino acids
GRXGGRAGGHEARAAXAGGVGRRARGGGRXGM

SEQ ID NO: 1499 - protein, 69 aa, Homo sapiens
  SITE (15): Xaa equals any of the naturally occurring L-amino acids
  SITE (30): Xaa equals any of the naturally occurring L-amino acids
  SITE (46): Xaa equals any of the naturally occurring L-amino acids
  SITE (60): Xaa equals any of the naturally occurring L-amino acids
  SITE (62): Xaa equals any of the naturally occurring L-amino acids
  SITE (68): Xaa equals any of the naturally occurring L-amino acids
VSHLLAGFCVWVVLXWVGGSVPNLGPAEQXQNHYLPSCLAVRREWXADCKGLGAVFHNLXLXQVQGLXL

SEQ ID NO: 1500 - protein, 109 aa, Homo sapiens
  SITE (89): Xaa equals any of the naturally occurring L-amino acids
NHERNKKETKQKRNEKDIMMSSKPTSHAEVNETIPNPYPPSSFMAPGFQQPLGSINLENQAQGAQRAQPYGITSPGIFASSQPGQGNIXMINPSVGTAVMNFKRKKQRH

SEQ ID NO: 1501 - protein, 71 aa, Homo sapiens
  SITE (11): Xaa equals any of the naturally occurring L-amino acids
  SITE (12): Xaa equals any of the naturally occurring L-amino acids
  SITE (29): Xaa equals any of the naturally occurring L-amino acids
  SITE (56): Xaa equals any of the naturally occurring L-amino acids
  SITE (60): Xaa equals any of the naturally occurring L-amino acids
VDEGGYWGWLXXKIMENHFSIHLPILNLXNKVIYCKVLCPLKEVLKRVRMDLKKNXNLEXFKMVFVGRFLL

SEQ ID NO: 1502 - protein, 52 aa, Homo sapiens
  SITE (13): Xaa equals any of the naturally occurring L-amino acids
  SITE (18): Xaa equals any of the naturally occurring L-amino acids
  SITE (19): Xaa equals any of the naturally occurring L-amino acids
  SITE (29): Xaa equals any of the naturally occurring L-amino acids
  SITE (34): Xaa equals any of the naturally occurring L-amino acids
  SITE (40): Xaa equals any of the naturally occurring L-amino acids
  SITE (50): Xaa equals any of the naturally occurring L-amino acids
VPLQVPVRNSRVXPRVRXXSNVCQNSQFXASKSXYIESAXFLFFLFFFFXFF

SEQ ID NO: 1503 - protein, 34 aa, Homo sapiens
  SITE (6): Xaa equals any of the naturally occurring L-amino acids
  SITE (14): Xaa equals any of the naturally occurring L-amino acids
  SITE (30): Xaa equals any of the naturally occurring L-amino acids
  SITE (33): Xaa equals any of the naturally occurring L-amino acids
LDIKQXTMHQEYKXGKKKKKKKKKKKKKKXKKXK

SEQ ID NO: 1504 - protein, 36 aa, Homo sapiens
  SITE (1): Xaa equals any of the naturally occurring L-amino acids
  SITE (9): Xaa equals any of the naturally occurring L-amino acids
  SITE (12): Xaa equals any of the naturally occurring L-amino acids
  SITE (21): Xaa equals any of the naturally occurring L-amino acids
  SITE (28): Xaa equals any of the naturally occurring L-amino acids
XLEPQPGPXRPXRPPSRRSWXQGKPTGXEREAAARS

SEQ ID NO: 1505 - protein, 55 aa, Homo sapiens
  SITE (3): Xaa equals any of the naturally occurring L-amino acids
  SITE (41): Xaa equals any of the naturally occurring L-amino acids
  SITE (50): Xaa equals any of the naturally occurring L-amino acids
AVXFNFLSAASCVHFLLKVIGFCLSSKHKNLKGVLQIFCAXRWLFPSGSXFLNNN

SEQ ID NO: 1506 - protein, 58 aa, Homo sapiens
ICIVPPPVSLIRMTCAIFQRTCRQAGILDYFSYSETWPVWECGIQRWSHRCPYCKWQF

SEQ ID NO: 1507 - protein, 49 aa, Homo sapiens
  SITE (3): Xaa equals any of the naturally occurring L-amino acids
  SITE (5): Xaa equals any of the naturally occurring L-amino acids
  SITE (9): Xaa equals any of the naturally occurring L-amino acids
  SITE (21): Xaa equals any of the naturally occurring L-amino acids
  SITE (31): Xaa equals any of the naturally occurring L-amino acids
  SITE (43): Xaa equals any of the naturally occurring L-amino acids
LTXIXYYRXSWYACRYRSGIXGSTHASADAXVGGQGKVYSKSXKPCQLK

SEQ ID NO: 1508 - protein, 120 aa, Homo sapiens
  SITE (58): Xaa equals any of the naturally occurring L-amino acids
  SITE (103): Xaa equals any of the naturally occurring L-amino acids
  SITE (105): Xaa equals any of the naturally occurring L-amino acids
  SITE (109): Xaa equals any of the naturally occurring L-amino acids
  SITE (111): Xaa equals any of the naturally occurring L-amino acids
  SITE (115): Xaa equals any of the naturally occurring L-amino acids
VPLPPSLRSPGSHRRHHASGKPQRGLPASQPPRRALCPPARAPTALGSRPSPRPFGPXGAHGSDGDHGRRGSRGLGCGTRHGQRPDRSLQRGELGALPACCPXGXHPRXPXAPAXGALRL

SEQ ID NO: 1509 - protein, 100 aa, Homo sapiens
  SITE (13): Xaa equals any of the naturally occurring L-amino acids
  SITE (15): Xaa equals any of the naturally occurring L-amino acids
  SITE (17): Xaa equals any of the naturally occurring L-amino acids
  SITE (18): Xaa equals any of the naturally occurring L-amino acids
  SITE (22): Xaa equals any of the naturally occurring L-amino acids
  SITE (29): Xaa equals any of the naturally occurring L-amino acids
  SITE (37): Xaa equals any of the naturally occurring L-amino acids
  SITE (50): Xaa equals any of the naturally occurring L-amino acids
  SITE (51): Xaa equals any of the naturally occurring L-amino acids
  SITE (54): Xaa equals any of the naturally occurring L-amino acids
  SITE (55): Xaa equals any of the naturally occurring L-amino acids
  SITE (57): Xaa equals any of the naturally occurring L-amino acids
  SITE (63): Xaa equals any of the naturally occurring L-amino acids
  SITE (77): Xaa equals any of the naturally occurring L-amino acids
  SITE (79): Xaa equals any of the naturally occurring L-amino acids
  SITE (89): Xaa equals any of the naturally occurring L-amino acids
  SITE (99): Xaa equals any of the naturally occurring L-amino acids
VSIVAAQMFLFFXVXLXXISPXHLTSLWXIMVSELIXTFTQLEENLKDEXXSLXXTXKVNRIXVSVPDANGPSVGEXPXSELILYLSAXKFLDTAAFFXT

SEQ ID NO: 1510 - protein, 48 aa, Homo sapiens
  SITE (11): Xaa equals any of the naturally occurring L-amino acids
  SITE (24): Xaa equals any of the naturally occurring L-amino acids
  SITE (32): Xaa equals any of the naturally occurring L-amino acids
  SITE (34): Xaa equals any of the naturally occurring L-amino acids
  SITE (42): Xaa equals any of the naturally occurring L-amino acids
  SITE (45): Xaa equals any of the naturally occurring L-amino acids
GKSKFWVEVLXSMSFLLFLFYLKXLIYPEWQXLXQADGHNLXSKXFFI

SEQ ID NO: 1511 - protein, 33 aa, Homo sapiens
  SITE (3): Xaa equals any of the naturally occurring L-amino acids
  SITE (15): Xaa equals any of the naturally occurring L-amino acids
  SITE (33): Xaa equals any of the naturally occurring L-amino acids
VRXSFLCTVFLRRMXLDSCLLSCSPSLIMELSX

SEQ ID NO: 1512 - protein, 61 aa, Homo sapiens [sequence omitted]

SEQ ID NO: 1513 - protein, 61 aa, Homo sapiens
  SITE (3): Xaa equals any of the naturally occurring L-amino acids
  SITE (8): Xaa equals any of the naturally occurring L-amino acids
  SITE (26): Xaa equals any of the naturally occurring L-amino acids
  SITE (36): Xaa equals any of the naturally occurring L-amino acids
  SITE (41): Xaa equals any of the naturally occurring L-amino acids
  SITE (46): Xaa equals any of the naturally occurring L-amino acids
  SITE (57): Xaa equals any of the naturally occurring L-amino acids
IPXSSLGXYPCRYRSGIPGSTHASVXLRCGAPTADXAAGPXRSAAXRSQEAGTSWKXRPAR

SEQ ID NO: 1514 - protein, 45 aa, Homo sapiens
  SITE (3): Xaa equals any of the naturally occurring L-amino acids
PRXRARRAEDGIGLDLPLYPAHPQDFHEVEDLIKTAIGNTLVQDI

SEQ ID NO: 1515 - protein, 39 aa, Homo sapiens
  SITE (31): Xaa equals any of the naturally occurring L-amino acids
  SITE (33): Xaa equals any of the naturally occurring L-amino acids
  SITE (35): Xaa equals any of the naturally occurring L-amino acids
  SITE (39): Xaa equals any of the naturally occurring L-amino acids
ASSRSRAAALFFFFFFFFFFFSFILLFIFPXYXNXQQLX

SEQ ID NO: 1516 - protein, 66 aa, Homo sapiens
  SITE (3): Xaa equals any of the naturally occurring L-amino acids
  SITE (9): Xaa equals any of the naturally occurring L-amino acids
  SITE (12): Xaa equals any of the naturally occurring L-amino acids
  SITE (28): Xaa equals any of the naturally occurring L-amino acids
  SITE (33): Xaa equals any of the naturally occurring L-amino acids
  SITE (47): Xaa equals any of the naturally occurring L-amino acids
  SITE (52): Xaa equals any of the naturally occurring L-amino acids
TLXGLPHQXQHXDRPQSCTFAPKLLFTXPFNLXAATTSQGRHREGEXRKKSXSLLSSKTTTNYTGF

SEQ ID NO: 1517 - protein, 75 aa, Homo sapiens
  SITE (7): Xaa equals any of the naturally occurring L-amino acids
  SITE (73): Xaa equals any of the naturally occurring L-amino acids
  SITE (74): Xaa equals any of the naturally occurring L-amino acids
  SITE (75): Xaa equals any of the naturally occurring L-amino acids
RTRHEKXGDKSRINTGCSQFCLLKKKKKKKKKKKKKKKKKKKKKKKKKKKKKKKKKKKKKKKKKKKKKGGPVXXX

SEQ ID NO: 1518 - protein, 84 aa, Homo sapiens
  SITE (16): Xaa equals any of the naturally occurring L-amino acids
  SITE (19): Xaa equals any of the naturally occurring L-amino acids
  SITE (21): Xaa equals any of the naturally occurring L-amino acids
SWYACRYRSGIPGSTXASXKXKGLQKHSFLCCSLLGFMQRQFCVNVQLTLIWKYENQSILVIKNFFTIVIILMFILCKITHLIK

SEQ ID NO: 1519 - protein, 52 aa, Homo sapiens [sequence omitted]

SEQ ID NO: 1520 - protein, 45 aa, Homo sapiens
  SITE (32): Xaa equals any of the naturally occurring L-amino acids
  SITE (39): Xaa equals any of the naturally occurring L-amino acids
  SITE (41): Xaa equals any of the naturally occurring L-amino acids
  SITE (44): Xaa equals any of the naturally occurring L-amino acids
  SITE (45): Xaa equals any of the naturally occurring L-amino acids
INICSFQKKKKKKKKKKKKKKKKKKKKKKKKXGGRFKGXKXTYXX

SEQ ID NO: 1521 - protein, 71 aa, Homo sapiens
  SITE (1): Xaa equals any of the naturally occurring L-amino acids
  SITE (11): Xaa equals any of the naturally occurring L-amino acids
  SITE (19): Xaa equals any of the naturally occurring L-amino acids
  SITE (24): Xaa equals any of the naturally occurring L-amino acids
  SITE (26): Xaa equals any of the naturally occurring L-amino acids
  SITE (34): Xaa equals any of the naturally occurring L-amino acids
  SITE (35): Xaa equals any of the naturally occurring L-amino acids
  SITE (37): Xaa equals any of the naturally occurring L-amino acids
  SITE (42): Xaa equals any of the naturally occurring L-amino acids
  SITE (46): Xaa equals any of the naturally occurring L-amino acids
  SITE (53): Xaa equals any of the naturally occurring L-amino acids
  SITE (70): Xaa equals any of the naturally occurring L-amino acids
XTHLRSDWTRXIILRIANXSLGLXLXVDFSMLRXXPXRLELXLDDXEEFENIXKDLETRKKQKEDVEVVXG

SEQ ID NO: 1522 - protein, 41 aa, Homo sapiens
  SITE (34): Xaa equals any of the naturally occurring L-amino acids
  SITE (38): Xaa equals any of the naturally occurring L-amino acids
SEKVKTAFTKPGRWGLCEPLCTGSLRDSAWCSRXILAXVGE

SEQ ID NO: 1523 - protein, 58 aa, Homo sapiens
  SITE (52): Xaa equals any of the naturally occurring L-amino acids
  SITE (55): Xaa equals any of the naturally occurring L-amino acids
  SITE (58): Xaa equals any of the naturally occurring L-amino acids
GHALLHLKNKLCSNCHKKKKKKKKKKKKKKKKNKKKKKKKKKKKKKKKKKKXGGXFKX

SEQ ID NO: 1524 - protein, 24 aa, Homo sapiens
  SITE (14): Xaa equals any of the naturally occurring L-amino acids
  SITE (15): Xaa equals any of the naturally occurring L-amino acids
  SITE (23): Xaa equals any of the naturally occurring L-amino acids
PVLTHGMPPAIRPXXSSWSSSTXT

SEQ ID NO: 1525 - protein, 35 aa, Homo sapiens
  SITE (29): Xaa equals any of the naturally occurring L-amino acids
SKSRELPLLLVTCPLLSSFCSGKPWDSAXTYHCRC

SEQ ID NO: 1526 - protein, 33 aa, Homo sapiens
SLAKHLNHLSILSWFIIIKAQNNLLLENMCFYK

SEQ ID NO: 1527 - protein, 85 aa, Homo sapiens
  SITE (1): Xaa equals any of the naturally occurring L-amino acids
  SITE (3): Xaa equals any of the naturally occurring L-amino acids
  SITE (9): Xaa equals any of the naturally occurring L-amino acids
  SITE (28): Xaa equals any of the naturally occurring L-amino acids
  SITE (29): Xaa equals any of the naturally occurring L-amino acids
  SITE (31): Xaa equals any of the naturally occurring L-amino acids
  SITE (32): Xaa equals any of the naturally occurring L-amino acids
  SITE (34): Xaa equals any of the naturally occurring L-amino acids
  SITE (36): Xaa equals any of the naturally occurring L-amino acids
  SITE (38): Xaa equals any of the naturally occurring L-amino acids
  SITE (39): Xaa equals any of the naturally occurring L-amino acids
  SITE (42): Xaa equals any of the naturally occurring L-amino acids
  SITE (43): Xaa equals any of the naturally occurring L-amino acids
  SITE (47): Xaa equals any of the naturally occurring L-amino acids
  SITE (52): Xaa equals any of the naturally occurring L-amino acids
  SITE (53): Xaa equals any of the naturally occurring L-amino acids
  SITE (55): Xaa equals any of the naturally occurring L-amino acids
  SITE (60): Xaa equals any of the naturally occurring L-amino acids
  SITE (66): Xaa equals any of the naturally occurring L-amino acids
  SITE (70): Xaa equals any of the naturally occurring L-amino acids
  SITE (71): Xaa equals any of the naturally occurring L-amino acids
  SITE (83): Xaa equals any of the naturally occurring L-amino acids
XGXGETQGXAMGCMVASGLLTGLAEVLXXLXXTXQXGXXQYXXFRVXLESMXXLXDLEAXWAPSPXLEAXXLLAAVCHHPALXLR

SEQ ID NO: 1528 - protein, 58 aa, Homo sapiens; identical to SEQ ID NO: 1372

SEQ ID NO: 1529 - protein, 90 aa, Homo sapiens
CFSLCMGGTSAVSESTTISSGAGPSARPQKNRRPQESCRTGGLFLLSREAQGMLWRDFTCHHFQVNRTRALMVFKPCWKKVPMVSLVLPV

SEQ ID NO: 1530 - protein, 62 aa, Homo sapiens
ANLQPKNLFKRHLWSCDETSSKTHSKTPLPPVGHQSATKHEQILLLIGFPCDLVPEVFGSVQ

SEQ ID NO: 1531 - protein, 31 aa, Homo sapiens
  SITE (8): Xaa equals any of the naturally occurring L-amino acids
  SITE (19): Xaa equals any of the naturally occurring L-amino acids
  SITE (27): Xaa equals any of the naturally occurring L-amino acids
  SITE (28): Xaa equals any of the naturally occurring L-amino acids
  SITE (30): Xaa equals any of the naturally occurring L-amino acids
CNIIEMKXSLVGTDSLFIXLQSLRIHXXKXH

SEQ ID NO: 1532 - protein, 26 aa, Homo sapiens
  SITE (15): Xaa equals any of the naturally occurring L-amino acids
  SITE (16): Xaa equals any of the naturally occurring L-amino acids
  SITE (17): Xaa equals any of the naturally occurring L-amino acids
  SITE (19): Xaa equals any of the naturally occurring L-amino acids
AVSAVQYSTDRWTQXXXHXGNRHLSS

SEQ ID NO: 1533 - protein, 55 aa, Homo sapiens
  SITE (2): Xaa equals any of the naturally occurring L-amino acids
  SITE (10): Xaa equals any of the naturally occurring L-amino acids
  SITE (11): Xaa equals any of the naturally occurring L-amino acids
  SITE (14): Xaa equals any of the naturally occurring L-amino acids
  SITE (21): Xaa equals any of the naturally occurring L-amino acids
  SITE (22): Xaa equals any of the naturally occurring L-amino acids
  SITE (24): Xaa equals any of the naturally occurring L-amino acids
  SITE (34): Xaa equals any of the naturally occurring L-amino acids
  SITE (41): Xaa equals any of the naturally occurring L-amino acids
  SITE (47): Xaa equals any of the naturally occurring L-amino acids
  SITE (55): Xaa equals any of the naturally occurring L-amino acids
HXSVQLRTVXXPAXVNEPVPXXSXSKPPMSISFXAHLNTCXYILYSXQNNLYLIX

SEQ ID NO: 1534 - protein, 48 aa, Homo sapiens
  SITE (8): Xaa equals any of the naturally occurring L-amino acids
  SITE (10): Xaa equals any of the naturally occurring L-amino acids
  SITE (19): Xaa equals any of the naturally occurring L-amino acids
  SITE (30): Xaa equals any of the naturally occurring L-amino acids
  SITE (31): Xaa equals any of the naturally occurring L-amino acids
  SITE (32): Xaa equals any of the naturally occurring L-amino acids
  SITE (41): Xaa equals any of the naturally occurring L-amino acids
GTLVLNQXSXSLFMYCFTXFYSYVKFWINXXXCNYKLRPVXLFLKAPY

SEQ ID NO: 1535 - protein, 53 aa, Homo sapiens
  SITE (7): Xaa equals any of the naturally occurring L-amino acids
  SITE (8): Xaa equals any of the naturally occurring L-amino acids
  SITE (26): Xaa equals any of the naturally occurring L-amino acids
  SITE (27): Xaa equals any of the naturally occurring L-amino acids
  SITE (41): Xaa equals any of the naturally occurring L-amino acids
  SITE (44): Xaa equals any of the naturally occurring L-amino acids
  SITE (47): Xaa equals any of the naturally occurring L-amino acids
MGPLSAXXCRLHVPWKEVLLTALLVXXWNPPTTAKLTIESXPFXVAXGKEVLL

SEQ ID NO: 1536 - protein, 70 aa, Homo sapiens
  SITE (1): Xaa equals any of the naturally occurring L-amino acids
  SITE (17): Xaa equals any of the naturally occurring L-amino acids
XIINTLLALLLIIITFXLPQLNGYIEKSTPYECGFDPISPARVPFSIKFFLVAITFLLFDLEIALLLPLP

SEQ ID NO: 1537 - protein, 53 aa, Homo sapiens
LPQLNGYIEKSTPYECGFDPISPARVPFSIKFFLVAITFLLFDLEIALLLPLP

SEQ ID NO: 1538 - protein, 53 aa, Homo sapiens
  SITE (15): Xaa equals any of the naturally occurring L-amino acids
  SITE (36): Xaa equals any of the naturally occurring L-amino acids
LPQLNGYIKKSTPYXCGFDPISPARVPFSIKFFLVXITFLLFDLKIALLLPLP

SEQ ID NO: 1539 - protein, 53 aa, Homo sapiens; identical to SEQ ID NO: 1537

SEQ ID NO: 1540 - protein, 57 aa, Homo sapiens
VCFKGLYLTNGFPLTELVFISDLTPLLNGSSQDRMFVTTVLEIEQLLARVGVLKDSI

SEQ ID NO: 1541 - protein, 137 aa, Homo sapiens
  SITE (87): Xaa equals any of the naturally occurring L-amino acids
WIPRAAGIRHEGSSDWSYGLEKGSLGMPSEVGDRAGAQAPVRNGRYLASCGILMSRTLPLHTSILPKEICARTFFKITAPLINKRKXYSERRILGYSMQEMYDVVSGVEDYKHFVPWCKKSDVISKRSGYCKTRLEI

SEQ ID NO: 1542 - protein, 122 aa, Homo sapiens
  SITE (46): Xaa equals any of the naturally occurring L-amino acids
  SITE (75): Xaa equals any of the naturally occurring L-amino acids
  SITE (81): Xaa equals any of the naturally occurring L-amino acids
  SITE (82): Xaa equals any of the naturally occurring L-amino acids
  SITE (87): Xaa equals any of the naturally occurring L-amino acids
  SITE (92): Xaa equals any of the naturally occurring L-amino acids
  SITE (110): Xaa equals any of the naturally occurring L-amino acids
  SITE (111): Xaa equals any of the naturally occurring L-amino acids
  SITE (118): Xaa equals any of the naturally occurring L-amino acids
  SITE (121): Xaa equals any of the naturally occurring L-amino acids
ARERLGMDALVAEEEAEAKGNEVRPSGRVFLSSAALRLTCTFSSGXGPSCQPFQNIFPWILRYLTFQDSRVLIIXLGNFWXXWTQSXFLKFXPQGLPALGGSKVFPKGPXXPAPFFKXRIXS

SEQ ID NO: 1543 - protein, 57 aa, Homo sapiens
  SITE (48): Xaa equals any of the naturally occurring L-amino acids
  SITE (55): Xaa equals any of the naturally occurring L-amino acids
  SITE (57): Xaa equals any of the naturally occurring L-amino acids
YPASQIVHHFMELCWDKCVEKPGNRLDSRTENCLSSCVDRFIDTTLAXTQSVCPXLX

SEQ ID NO: 1544 - protein, 63 aa, Homo sapiens
  SITE (5): Xaa equals any of the naturally occurring L-amino acids
  SITE (22): Xaa equals any of the naturally occurring L-amino acids
GGIAXAGSGHMNYIQVTPQEKXAIERLKALGFPEGLVIQAYFACEKNENLAANFLLQQNFDED

SEQ ID NO: 1545 - protein, 124 aa, Homo sapiens
  SITE (99): Xaa equals any of the naturally occurring L-amino acids
EGLTPQEICDKYHIIQSLGLCCCTILICPTQIEGVPLAEGLTPQEICDKYHIIHADIYRWFNISFDIFGRTTTPQQTKITQDIFQQLLKRSFVLQDTVXQLRCEHCARFLADRFRGRRVSLLWL

SEQ ID NO: 1546 - protein, 184 aa, Homo sapiens
  SITE (1): Xaa equals any of the naturally occurring L-amino acids
  SITE (167): Xaa equals any of the naturally occurring L-amino acids
XGFTCRQKASLNWHMKKHDADSFYQFSCNICGKKFEKKDSVVAHKAKSHPEVLIAEALAANAGALITSTDILGTNPESLTQPSDGQGLPLLPEPLGNSTSGECLLLEAEGMSKSYCSGTERVSLMADGKIFVGSGSSGGTEGLVMNSDILGATTEVLIEDSDSAGPXWTGRLGAWDSSDFVFKS

SEQ ID NO: 1547 - DNA, 733 bp, Homo sapiens
gggatccggagcccaaatcttctgacaaaactcacacatgcccaccgtgcccagcacctgaattcgagggtgcaccgtcagtcttcctcttccccccaaaacccaaggacaccctcatgatctcccggactcctgaggtcacatgcgtggtggtggacgtaagccacgaagaccctgaggtcaagttcaactggtacgtggacggcgtggaggtgcataatgccaagacaaagccgcgggaggagcagtacaacagcacgtaccgtgtggtcagcgtcctcaccgtcctgcaccaggactggctgaatggcaaggagtacaagtgcaaggtctccaacaaagccctcccaacccccatcgagaaaaccatctccaaagccaaagggcagccccgagaaccacaggtgtacaccctgcccccatcccgggatgagctgaccaagaaccaggtcagcctgacctgcctggtcaaaggcttctatccaagcgacatcgccgtggagtgggagagcaatgggcagccggagaacaactacaagaccacgcctcccgtgctggactccgacggctccttcttcctctacagcaagctcaccgtggacaagagcaggtggcagcaggggaacgtcttctcatgctccgtgatgcatgaggctctgcacaaccactacacgcagaagagcctctccctgtctccgggtaaatgagtgcgacggccgcgactctagaggat

SEQ ID NO: 1548 - protein, 5 aa, Homo sapiens
  SITE (3): Xaa equals any of the naturally occurring L-amino acids
WSXWS

SEQ ID NO: 1549 - DNA, 86 bp, Homo sapiens
gcgcctcgagatttccccgaaatctagatttccccgaaatgatttccccgaaatgatttccccgaaatatctgccatctcaattag

SEQ ID NO: 1550 - DNA, 27 bp, Homo sapiens
gcggcaagctttttgcaaagcctaggc

SEQ ID NO: 1551 - DNA, 271 bp, Homo sapiens
ctcgagatttccccgaaatctagatttccccgaaatgatttccccgaaatgatttccccgaaatatctgccatctcaattagtcagcaaccatagtcccgcccctaactccgcccatcccgcccctaactccgcccagttccgcccattctccgccccatggctgactaattttttttatttatgcagaggccgaggccgcctcggcctctgagctattccagaagtagtgaggaggcttttttggaggcctaggcttttgcaaaaagctt

SEQ ID NO: 1552 - DNA, 32 bp, Homo sapiens
gcgctcgagggatgacagcgatagaaccccgg

SEQ ID NO: 1553 - DNA, 31 bp, Homo sapiens
gcgaagcttcgcgactccccggatccgcctc

SEQ ID NO: 1554 - DNA, 12 bp, Homo sapiens
ggggactttccc

SEQ ID NO: 1555 - DNA, 73 bp, Homo sapiens
gcggcctcgaggggactttcccggggactttccggggactttccgggactttccatcctgccatctcaattag

SEQ ID NO: 1556 - DNA, 256 bp, Homo sapiens
ctcgaggggactttcccggggactttccggggactttccgggactttccatctgccatctcaattagtcagcaaccatagtcccgcccctaactccgcccatcccgcccctaactccgcccagttccgcccattctccgccccatggctgactaattttttttatttatgcagaggccgaggccgcctcggcctctgagctattccagaagtagtgaggaggcttttttggaggcctaggcttttgcaaaaagctt

What is claimed is:

1. An isolated nucleic acid molecule comprising a polynucleotide having a nucleotide sequence at least 95% identical to a sequence selected from the group consisting of:
(a) a polynucleotide fragment of SEQ ID NO:X or a polynucleotide fragment of the cDNA sequence included in the related cDNA clone, which is hybridizable to SEQ ID NO:X;
(b) a polynucleotide encoding a polypeptide fragment of SEQ ID NO:Y or a polypeptide fragment encoded by the cDNA sequence included in the related cDNA clone, which is hybridizable to SEQ ID NO:X;
(c) a polynucleotide encoding a polypeptide fragment of a polypeptide encoded by SEQ ID NO:X or a polypeptide fragment encoded by the cDNA sequence included in the related cDNA clone, which is hybridizable to SEQ ID NO:X;
(d) a polynucleotide encoding a polypeptide domain of SEQ ID NO:Y or a polypeptide domain encoded by the cDNA sequence included in the related cDNA clone, which is hybridizable to SEQ ID NO:X;
(e) a polynucleotide encoding a polypeptide epitope of SEQ ID NO:Y or a polypeptide epitope encoded by the cDNA sequence included in the related cDNA clone, which is hybridizable to SEQ ID NO:X;
(f) a polynucleotide encoding a polypeptide of SEQ ID NO:Y or the cDNA sequence included in the related cDNA clone, which is hybridizable to SEQ ID NO:X, having biological activity;
(g) a polynucleotide which is a variant of SEQ ID NO:X;
(h) a polynucleotide which is an allelic variant of SEQ ID NO:X;
(i) a polynucleotide which encodes a species homologue of the SEQ ID NO:Y;
(j) a polynucleotide capable of hybridizing under stringent conditions to any one of the polynucleotides specified in (a)-(i), wherein said polynucleotide does not hybridize under stringent conditions to a nucleic acid molecule having a nucleotide sequence of only A residues or of only T residues.

2. The isolated nucleic acid molecule of claim 1, wherein the polynucleotide fragment comprises a nucleotide sequence encoding a protein.

3. The isolated nucleic acid molecule of claim 1, wherein the polynucleotide fragment comprises a nucleotide sequence encoding the sequence identified as SEQ ID NO:Y or the polypeptide encoded by the cDNA sequence included in the related cDNA clone, which is hybridizable to SEQ ID NO:X.

4. The isolated nucleic acid molecule of claim 1, wherein the polynucleotide fragment comprises the entire nucleotide sequence of SEQ ID NO:X or the cDNA sequence included in the related cDNA clone, which is hybridizable to SEQ ID NO:X.

5. The isolated nucleic acid molecule of claim 2, wherein the nucleotide sequence comprises sequential nucleotide deletions from either the C-terminus or the N-terminus.

6. The isolated nucleic acid molecule of claim 3, wherein the nucleotide sequence comprises sequential nucleotide deletions from either the C-terminus or the N-terminus.

7. A recombinant vector comprising the isolated nucleic acid molecule of claim 1.

8. A method of making a recombinant host cell comprising the isolated nucleic acid molecule of claim 1.

9. A recombinant host cell produced by the method of claim 8.

10. The recombinant host cell of claim 9 comprising vector sequences.

11. An isolated polypeptide comprising an amino acid sequence at least 95% identical to a sequence selected from the group consisting of:
(a) a polypeptide fragment of SEQ ID NO:Y or of the sequence encoded by the cDNA included in the related cDNA clone;
(b) a polypeptide fragment of SEQ ID NO:Y or of the sequence encoded by the cDNA included in the related cDNA clone, having biological activity;
(c) a polypeptide domain of SEQ ID NO:Y or of the sequence encoded by the cDNA included in the related cDNA clone;
(d) a polypeptide epitope of SEQ ID NO:Y or of the sequence encoded by the cDNA included in the related cDNA clone;
(e) a full length protein of SEQ ID NO:Y or of the sequence encoded by the cDNA included in the related cDNA clone;
(f) a variant of SEQ ID NO:Y;
(g) an allelic variant of SEQ ID NO:Y; or
(h) a species homologue of the SEQ ID NO:Y.

12. The isolated polypeptide of claim 11, wherein the full length protein comprises sequential amino acid deletions from either the C-terminus or the N-terminus.

13. An isolated antibody that binds specifically to the isolated polypeptide of claim 11.

14. A recombinant host cell that expresses the isolated polypeptide of claim 11.

15. A method of making an isolated polypeptide comprising:
(a) culturing the recombinant host cell of claim 14 under conditions such that said polypeptide is expressed; and
(b) recovering said polypeptide.

16. The polypeptide produced by claim 15.

17. A method for preventing, treating, or ameliorating a medical condition, comprising administering to a mammalian subject a therapeutically effective amount of the polypeptide of claim 11 or the polynucleotide of claim 1.

18. A method of diagnosing a pathological condition or a susceptibility to a pathological condition in a subject comprising:
(a) determining the presence or absence of a mutation in the polynucleotide of claim 1; and
(b) diagnosing a pathological condition or a susceptibility to a pathological condition based on the presence or absence of said mutation.

19. A method of diagnosing a pathological condition or a susceptibility to a pathological condition in a subject comprising:
(a) determining the presence or amount of expression of the polypeptide of claim in a biological sample; and
(b) diagnosing a pathological condition or a susceptibility to a pathological condition based on the presence or amount of expression of the polypeptide.

20. A method for identifying a binding partner to the polypeptide of claim 1 comprising:
(a) contacting the polypeptide of claim 11 with a binding partner; and
(b) determining whether the binding partner effects an activity of the polypeptide.

21. The gene corresponding to the cDNA sequence of SEQ ID NO:Y.

22. A method of identifying an activity in a biological assay, wherein the method comprises:
(a) expressing SEQ ID NO:X in a cell;
(b) isolating the supernatant;
(c) detecting an activity in a biological assay; and
(d) identifying the protein in the supernatant having the activity.

23. The product produced by the method of claim 20.
